United States Patent Application Publication US 2026/0275333 A1 - sequence listing, part 14

SEQ ID NO: 3045 - RNA, 64444167 nt, Homo sapiens (residues 27,925,808-30,073,946 of 64,444,167)
  source 1..64444167: mol_type = mRNA
ccctttcatagagcaggttggaaacactctttttgtagtatctggatgaggacatttggagcgctttcaggcgtatggtgaaaaaggaaatatcttcccgtaaaaactagacagaagcattctcagaagtttatttgtgatgtgtgccctcaactaacagagttgaacctttcttttgatagagcagttttgaaacactctttttgtaaaatctgcaagaggatatttggatagctttgaggatttcgttgcaaacgggaatggcttaatataaactctagacagaagcattctcagaaacttcgtcgggatgtttcgattgaagtcccagtgttgaacattcccttttatagagcaggttggaaacactctttctgcattccctggaagtggacatttggagcgctttcaggacgacggtgaaaatggaaatatcttccaataaaatctgcatagaagcaatgtcagaaacttttatgtgatggatctactcagctaacagagttgaacctttcttttgagagagcagttttgcaacactctttttgtggaatatgcaagtggatattagggcagctttgaggatttcgttggaaacgggaatacatgtaaaaagcagacagcagcattctcagaaacttctttgtgatgtttgcattgaagtcacagagttgaacattccctttgagagagcaggtttgaaacacgccttttgtcatatctggaagtgtccattcggaacgcattcaggcttgtgttgaaaaaggaaatatcctcccataaaaactagacagaagcattctcagaaacttatctgtgatgtatgtactcaactaacagaactaaaccatcgttttgaaggagcagttttgaaacactctttttgcggaatctgcaagtggatatttggctagctgggaggatttcgttggaaacgggattacatacaaaaagcagacagcagcattctcagaaacttctttgtgatgtttgcattcaagtcacagagttgaacattccctttcatagagcaggttggaaacactctttttgtagtatctggatgtggacatttggatcgctttcaggcctatggtgaaaaaggaaatatcttcccatgaaaactagacagaagcattctcagaaacttatttgtgatgtgtgccctcaactgacagtgttgaacctttgttttgatagagcagttctgaaacacactttttgtaaaatctgcaagaggatatttggatagctttgaggatttcgttggaaacgggaatgtcttcatgtaaactctggacagaagcattctcagaaactgctttgggatgtttcaattgaagtcccagtgttgaacattcccattcatagagcaggtttgaaacactctttttgtactatctggaagtggacatttggagcgctttcaggtctacggtgaaaaaggagatatcttccaataaaaactagatagaagcaatgtcagaacatttttcatgatgtatctactcagcaaacagagttgaacctttcttttgagagagcagttttgaaacactctttttgtggaatatgcaagtgggtattaggccagcttggaggatttcgttggaaacgggaatacgtataaaaagcagacagcagcattgtcagaaactactttgtgatgtttgcattcaagtcacagaattgaacactccctttcacagagcaggtttgaaacactctttttgtagtgtctgtaagtgaacatttggattgctttcaggcctaaggtgaaaaaggaaatatcttcccataaaaactagacagaagcattctcagaaacttgtttgtgatgtgtgccctctactgacagagttgaacctttctttgcaaagagcagttttgaaacactctttttgtagaatctgcaagaggatatttggatagctttgaggatttcttgggaaacgggaatgtcttcagataaactctagacagaagcattttcagaaacttctttgggatgtttcaattgaagtcacagtgttgaacattccctttcacagagcaggtttgaaacactctttttgtagtgtctataagtgaacatttggcgtgctttcaggcctaacgtgaaaaaggaaatatcttcccataaaaactagacagaagcattctcagaaacttgttcgtgatgtgtgccctctactgacagagttgaacctttctttgcaaagagcagctttgaaacacactttttgtagaatctgcaagaggatatttggatagctttgaggatttcgttggaaacgggtatgtcttcagataaactctagacagaagcattctcagaaacttctttgggatgttgcatgcaagtcacagagtagaacattcccattcatagagcagatttgaaacactctttttgtagtatctggaagtggacatttggagcgctttcaggcctatgttgaaaaaggaaatatcttcccataaaaactagacggaagcattctcagaaacttatttgtgatgtgtttgctcaactaacaggattgaaccatcgttttgaaggagcagttttgaaacactgttttcgtggaatctgcaagtggatatttggctagctttgaggatttcgttggaaacgggattacatataaaaaggagacagcagcattctcagaaacttctttgtgatgtctgcattcaattcacagagttgagcattccctttcatagagcaggttggaaacactctttttgtagtatctggatgtggacatttggatcgctttcaggcctatggtgaaaaaggaaatatcttcccatgaaaactagacagaagcattctcagaaacttatttgtgatgtgtgccctcaactgacagtgttgaacctttgttttgatagagcagttctgaaacacactttttgtaaaatctgcaagaggatatttggatagctttgaggatttcgttggaaacgggaatgtcttcatgtaaactctagacaggaagcattctcagaaactgctttgggatgtttcaattgaagtcccagtgttgaacattcccattcatagagcaggtttgaaacactctttttgtactatctggaagtggacatttggagcgctttcaggtctacggtgaaaaaggagatatcttccaataaaaactagatagaagcaatgtcagaacttttttcatgatgtatctactcagcaaacagagttgaacctttcttttgagagagcagttttgaaacactctttttgtggaatatgaaagtgggtattaggccagcttggaggatttcgttggaaacgggaatacgtataaaaagcagacagcagcattgtcagaaactactttgtgatgtttgcattcaagtcacagaactgaacactccctttcacagagcaggtttgaaacactctttttgtagtgtctgtaagtgaacatttggattgctttcaggcctaaggtgaaaaaggaaatatcttcccataaaaactagacagaagcattctcagaaacttgtttgtgatgtgtgccctctactgacagagttgaacctttctttgcaaagagcagttttgaaacactctttttgtagaatctgcaagaggatatttggatagctttgaggatttcttgggaaacgggaatgtcttcagataaactctagacagaagcattctcagaaacttctttgggatgtttcaattgaagtcacagtgttgaacattccctttcacagagcaggtttgaaacactctttttgtagtgtctataagtgaacatttggcgtgctttcaggcgtaacgtgaaaaaggaaatatcttcccataaaaaccagacagaagcattctcagaaacttgttcgtgatgtgtgccctctactgacagagttgaacctttctttgcaaagagcagctttgaaacacactttttgtagaatctgcaagaggatatttggatagcttggaggatttcgttggaaacgggtatgtcttcagataaactctagacagaagcattctcagaaacttctttgggatgttgcattcaagtcacagagtagaacattcccattcatagagcagatttgaaacactctttttgtagtatctggaagtggacatttggagcgctttcaggcctatgttgaaaaaggaaatatcttcccataaaaactagacggaagcattctcagaaacttacttgtgatgtgtttgctcaactaacagaattgaaccatcgttttgaaggagcagttttgaaacactgttttcgtggaatctgcaagtggatatttggctagctttgaggatttcgttggaaacgggattacatataaaaaggagacagcagcattctcagaaacttctttgtgatgtctgcattcaagtcacagagttgagcattccctttcatagagcaggttggaaacactctttttgtagtatctggatgaggacatttggagcgctttcaggcctatggtgaaaaaggaaatatcttcccgtaaaaactagacagaagcattctcagaaatttatttgtgatgtgtgccctcaactaacagagttgaacctttcttttgatagagcagttttgaaacactctttttgtaatatctgcaagaggatatttggatagctttgaggatttcattgcaaacgggaatggcttcatataaactctagacagaagcattctcagaaacttcgttgggatgtttcgattgaagtcccagtgttgaacattcccttttatagcgcacgttggaaacactctttttgcattccctggaagtggacatttggagcgctttcaggacgacggtgaaaatggaaatatcttccaataaaatctagatagaagcaacgtcagaaacttttatgtgatggatctactcagctaacagagttgaacctttcttttgagagagcagttttgcaacactctttttgtggaatatgcaagtggatattagggcagctttgaggatttcgttggaaacgggaatacatgtaaaaagcagacagcagcattctcagaaacttctttgtgatgtttgcattgaagtcacagagttgaacattccctttgagagagcaggtttgaaacacgccttttgtcatatctggaagtgtccattcggagcgcattcaggcttgtgttgaaaaaggaaatatcctcccataaaaactagacagaagcattctcagaaacttatctgtgatgtatgtactcaactaacagaactaaaccatccgttttgaaggagcagttttgaaacactctttttgcggaatctgcaagtggatatttggctagctgggaggatttcgttggaaacgggattacatacaaaaagcagacagcagcattctcagaaacttatttgtgatgtgtgccctcaactgacagtgttgaacctttgttttgatagagcagttctgatacacactttttgtaaaatctgcaagaggatatttggatagctttgaggatttcgttggaaacgggaatgtcttcatgtcaactctagacagaagcattctcagaaactgctttgggatgtttcaattgaagtcccagtgttgaacattcccattcatagagcaggtttgaaacactctttttgtactatcttgaagtggacatttggagcgctttcaggtctacggtgaaaaaggagatatcttccaataaaaactagatagaagcaatgtcagaacttttttcatgatgtatctactcagcaaacagagttgaacctttcttttgagagagcagttttgaaacagtctttgtggaatatgcaagtgggtattaggccagcttggaggatttcgttggaaacgggaatacgtataaaaagcagacagcagcattgtcagaaactactttgtgatgtttgcattcaagtcacagaactgaacactccctttcacagagcaggtttgaaacactctttttgtagtgtctgtaagtgaacatttggattgctttcaggcctaaggtgaaaaaggaaatatcttcccataaaaactagacagaagcattctcagaaacttgtttgtgatgtgtgccctctactgacagagttgaacctttctttgcaaagagcagttttgaaacactctttttgtagaatctgcaagaggatatttggatagctttgaggatttcttgggaaacgggaatgtcttcagataaactctagacagaagcattctcagaaacttctttgggatgtttcaattgaagtcacagtgttgaacattccctttcacagagcaggtttgaaacactctttttgtagtgtctataattgaacatttggcgtgctttcaggcctaacgtgaaaaaggaaatatcttcccataaaaactagacagaagcattctcagaaacttgttcgtgatgtgtgccctctactgacagagttgaacctttctttgcaaagagcagctttgaaacactctttttgtagaatctgcaagaggatatttggatagctttgaggatttcgttggaaacgggtatgtcttcagataaactctagacagaagcattctcagaaacttctttgggatgttgcattcaagtcacagagtagaacattcccatgcatagagcagatttgaaacactctttttgtagtatctggaagtggacatttggagcgctttcaggcctatgttgaaaaaggaaatatcttcccataaaaactagacggaagcattctcagaaacttacttgtgatgtgtttgctcaactaacagaattgaaccatcgttttgaaggagcagttttgaaacactgatttcgtggaatctgcaagtggatatttggctagctttgaggatttcgttgcaaacgggattacatataaaaaggagacagcagcattctcagaaacttctttgtgatgtttgcattcaagtcacagagttgaacattccctttcatagagcaggtttgaaacactctttttgtagtatctggatgtggacatttggatcgctttcaggcctatggtgaaaaaggaaatatcttcccatgaaaactagacagaagcattctcagaaacttatttgtgatgtgtgccctcaactgacagtgttgaacctttgttttgatagagcagttctgaaacacactttttgtaaaatctgcaagaggatatttggatagctttgaggatttcgttggaaacgggaatgtcttcatgtaaactctagacagaagcattctcagaaactgctttgggatgtttcaattgaagtcccagtgttgaacattccctttcatagagcaggtttgaaacactctttttgtagtatctggaagtggacatttggagcgctttcaggtctacggtgaaaaaggagatatcttccaataaaaactagatagaagcaatgtcagaacttttttcatgatgtatctactcagcaaacagagttgaacctttcttttgagagagcagttttgaaacactctttttgtggaatatgcaagtgggtattaggccagcttggaggatttcgttggaaacgggaatacgtataaaaagcagacagcagcattgtcagaaactactttgtgatgtttgcattcaagtcacagaattgaacactccctttcacagagcaggtttgaaacactctttttgtagtgtctgtaagtgaacatttggattgctttcaggcctaaggtgaaaaaggaaatatcatcccataaaaactagacagaagcattctcagaaacttgtttgtgatgtgtgccctctactgacagagttgaacctttctttgcaaagagcagttttgaaacactttttttgtagaatctgcaagaggatatttggatagctttgaggatttcttgggaaacgggaatgtcttcagataaactctagacagaagcattctcagaaacttctttgggatgtttcaattgaagtcacagtgttgaacattccctttcacagagcaggtttgaaacactctttttgtagtgtctataagtgaacatttggcgtgctttcaggcctaacgtgaaaaaggaaatatcttcccataaaaactagacagaagcattctcagaaacttgttcgtgatgtgtgccctctactgacagagttgaacctttctttgcaaagagcagctttgaaacacactttttgtagaatctgcaagaggatatttggatagcttggaggatttcgttggaaacgggtatgtcttcagataaactctagacagaagcattctcagaaacttctttgggatgttgcattcaagtcacagagtagaacattcccattcatagagcagatttgaaacactctttttgtagtatctggaagtggacatttggagcgctttcaggcctatgttgaaaaaggaaatatcttcccataaaaactagacggaagcattctcagaaacttatttgtgatgtgtttgctcaactaacaggattgaaccatcgttttgaaggagcagttttgaaacactgttttcgtggaatctgcaagtggatatttggctagctttgaggatttcgttggaaacgggattacatatacaaaggagacagcagcattctcagaaacttctttgtgatgtctgcattcaagtcacagagttgagcattccctttcatagagcaggttggaaacactctttttgtagtatctggatgaggacatttggagcgctttcaggcctatggtgaaaaaggaaatatcttcccgtaaaaactagacagaagcattctcagaagtttatttgtgatgtgtgccctcaactaacagagttgaacctttcttttgatagagcagttttgaaacactctttttgtaaaatctgcaagaggatatttggatagctttgaggatttcgttgcaaacgggaatggcgtcatataaactctagacagaagcattctcagaaacttcgttgggatgtttcgattgaagtcccagtgttgaacattcccttttatagagcaggttggaaacactctttctgcattccctggaagtggacatttggagcgctttcaggacgacggtgaaaatggaaatatcttccaagaaaatctagatagaagcaacgtcagaaacttttctgtgatggatctactcagctaacagagttgaacctttcttttgagagagcagttttgcaacactctttttgtggaatatgcaagtggatattagggcagctttgaggatttcgttggaaacgggaatacatgtaaaaagcagacagcagcattctcagaaacttctttgtgatgtttgcattgaagtcacagagttgaacattccctttgagagagcaggtttgaaacacgccttttgtcatatctggaagtgtccattcggagcgcattcaggcttgtgttgaaaaaggaaatatcctcccataaaaactagacagaagcattctcagaaacttatctgtgatgtatgtactcaactaacagaactaaaccatcgttttgaaggagcagttttgaaacactctttttgcggaatctgcaagtggatatttggctagctgggaggatttcgttggaaacgggattacatacaaaaagcagacagcagcattctcagaaacttctttgtgatgtttgcattcaagtcacagagttgaacattccctttcatagagcaggtttgaaacactctttttgtagtatctggatgtggacatttggatcgctttcaggcctatggtgaaaaaggaaatatcttcccatgaaaactagacagaagcattctcagaaacttatttgtgatgtgtgccctcaactgacagtgttgaacctttgttttgatagagcagttctgaaacacactttttgtaaaatctgcaagaggatatttggatagctttgaggatttcgttggaaacgggaatgtcttcatgtaaactctacacagaagcattctcagaaactgctttgggatgtttcaattgaagtcccagtgttgaacattcccattcatagagcaggtttgaagcactctttttgtactatctggaagtggacatttggagcgctttcaggtctacggtgaaaaaggagatatcttccaaaaaaaactagatagaagcaatgtcagaacttttttcatgatgtatctactcagcaaacagagttgaacctttcttttgagagagcagttttgaaacactctttttgtggaatatgcaagtgggtattaggccagcttggaggatttcgttggaaacgggaatacgtataaaaagcagacagcagcattgtcagaaactactttgtgatatttgcattcaagtcacagaattgaacactccctttcacagagcaggtttgaaacactctttttgtagtgtctgtaagtgaacatttggattgctttcaggcctaaggtgaaaaaggaaatatcttcccataaaaactagacagaagcattctcagaaacttgtttgtgatgtgtgccctctactgacagagttgaacctttctttgcaaagagcagttttgaaacactctttttgtagaatctgcaagaggatatttggatagctttgaggatttcttgggaaacgggaatgtcttcagataaactctagacagaagcattctcagaaacttctttgggatgtttcaattgaagtcacagtgttgaacattccctttcacagagcaggtttgaaacactctttttgtagtgtctataagtgaacatttggcgtgctttcaggcctaacgtgaaaaaggaaatatcttcccatagaaactagacagaagcattctcagaaacttgttcgtgatgtgtgccctctactgacagagttgaacctttctttgcaaagagcagctttgaaacacactttttgtagaatctgcaagaggatatttggatagctttgaggatttcgttggaaacgggtatgtcttcaaataaactctagacagaagcattctcagaaacttctttgggatgttgcattcaagtcacagagtagaacattcccattcatagagcagatttgaaacactctttttgtagtatctggaagtggacatttggagcgctttcaggcctatgttgaaaaaggaaatatcttcccataaaaactagacggaagcattctcagaaacttatttgtgatgtgtttgctcaactaacaggattgaaccatcgttttgaaggagcagttttgaaacactgttttcgtggaatctgcaagtggatatttggctagctttgaggatttcgttggaaacgggattacatataaaaaggagacagcagcattctcagaaacttctttgtgatgtctgcattcaagtcacagagttgagcattccctttcatagagcaggttggaaacactctttttgtagtatctggatgaggacatttggagcgctttcaggcctatggtgaaaaaggaaatatcttcccgtaaaaactagacagaagcattctcagaattttatttgtgatgtgtgccctcaactaacagagttgaacctttcttttgatagagcagttttgaaacactctttttgtaaaatctgcaagaggatatttggatagctttgaggatttcgttgcaaacgggaatggcttcatataaactctagacagaagcattctcagaaacttcgttgggatgtttcgattgaagtcccagtgttgaacattcccttttatagagcaggttggaaacactctttctgcattccctggaagtggacatttggagcgctttcaggacgacggtgaaaatggaaatatcttccaagaaaatctagatagaagcaacgtcagaaacttttctgtgatggatctactcagctaacagagttgaacctttcttttgagagagcagttttgcaacactctttttgtggaatatgcaagtggatattagggcagctttgaggatttcgttggaaacgggaatacatgtaaaaagcagacagcagcattctcagaaacttctttgtgatgtttgcattgaagtcacagagttgaacattccctttgagagagcaggtttgaaacacgccttttgtcatatctggaagtgtccattcggagcgcattcaggcttgtgttgaaaaaggaaatatcctcccagaaaaactagacagaagcattctcagaaacttatttgtgatgtatgtactcaactaacagaactaaaccatcgttttgaaggagcagttttgaaacactctttttgcggaatctgcaagtggatatttggctagctgggaggatttcgttggaaacgggattacatacaaaaagcagacagcagcattctcagaaacttatttgtgatgtgtgccctcaactgacagtgttgaacctttgttttgatagagcagttctgaaacacactttttgtaaaatctgcaagaggatatttggatagctttgaggatttcgttggaaacgggaatgtcttcatgtaaactctacacagaagcattctcagaaactgctttgggatgtttcaattgaagtcccagtgttgaacattcccattcatagagcaggtttgaaacactctttttgtactatctggaagtggacatttggagcgctttcaggtgtacggtgaaaaaggagatatcttccaataaaaactagatagaagcaatgtcagaacttttttcatgatgtatctactcagcaaacagagttgaacctttcttttgagagagcagttttgaaacactctttttgtggaatatgcaagtgggtattaggccagcttggaggatttcgttggaaacgggaatacgtataaaaagcagacagcagcattgtcagaaactactttgtgatgtttgcattcaagtcacagaattgaacactccctttcacagagcaggtttgaaacactcattttgtagtgtctgtaagtgaacatatggattgctttcaggcctaaggtgaaaaaggaaatatcttcccataaaaactagacagaagcattctcagaaacttgtttgtgatgtgtgccctctactgacagagttgaacctttctttgcaaagaccagttttgaaacactctttttgtagaatctgcaagaggatatttggatagctttgaggatttcttgggaaacgggaatgtcttcagataaactctagacagaagcattctcagaaacttctttgggatatttcaattgaagtcacagtgttgaacattccctttcacagagcaggtttgaaacactctttttgtagtgtctataagtgaacatttggcgtgctttcaggcctaacgtgaaaaaggaaatatcttcccataaaaactagacagaagcattctcagaaacttgttcgtgatgtgtgccctctactgacagagttgaacctttctttgcaaagagcagctttgaaacactctttttgtagaatctgcaagaggatatttggatagctttgaggatttcgttggaaacgggtatgtcttcagataaactctagacagaagcattctcagaaacttctttgggatgttgcattcaagtcacagagtagaacattcccatgcatagagcagatttgaaacactctttttgtagtatctggaagtggacatttggagcgctttcaggcctatgttgaaaaaggaaatatcttcccataaaaactagacggaagcattctcagaaacttacttgtgatgtgtttgctcaactaacagaattgaaccatcgttttgaaggagcagttttgaaacactgttttcgtggaatctgcaagtggatatttggctagctttgaggatttcgttggaaacgggattacatataaaaaggagacagcagcattctcagcaaactactttgtgatgtctgcattcaattcacagagttgagcattccctttcatagagcaggttggaaacactctttttgtagtatctggatgaggacatttggagcgctttcaggcgtatggtgaaaagggaaatatcttcccgtaaaaactagacagaagcattctcagaagtttatttgtgatgtgtgccctcaactaacagaagttgaacctttcttttgatagagcagttttgaaacactctttttgtaaaatctgcaagaggatatttggatagctttgaggatttcgttgcaaacgggaatggcttcatataaactctagacagaagcattctcagaaacttcgttgggatgtttcgattgaagtcccagtgttgaacattcccttttatagagcaggttggaaacactctttctgcattccctggaagtggacatttggagcgctttcaggacgacggtgaaaatggaaatatcttccaagaaaatctagatagaagcaacgtcagaaacttttctgtgatggatctactcagctaacagagttgaacctttcttttgagagagcagttttgcaacactctttttgtggaatatgcaagtggatattagggcagctttgaggatttcgttggaaacgggaatacatgtaaaaagcagacagcagcattctcagaaacttctttgtgatgtttgcattgaagtcacagagttgaacattccctttgagagagcaggtttgaaacacgccttttgtcatatctggaagtgtccattcggagcgcattcaggcttgtgttgaaaaaggaaatatcctcccagaaaaactagacagaagcattctcagaaacttatctgagatgtatgtactcaactaacagaactaaaccatcgttttgaaggagcagttttgaaacactctttttgcggaatctgcaagtggatatttggctagctgggaggatttcgttggaaacgggattacatacaaaaagcagacagcagcattctcagaaacttctttgtgatgtttgcattcaagtcacagagttgaacattccctttcatagagcaggtttgaaacactctttttgtagtatctggatgtggacatttggatcgctttcaggcctatggtgaaaaaggaaatatcttctcatgaaaactagacagaagcattctcagaaacttatttgtgatgtgtgccctcaactgacagtgttgaacctttgttttgatagagcagttctgaaacacactttttgtaaaatctgcaagaggatatttggatagctttgaggatttcgttggaaacgggaatgtcttcatgtaaactctagacagaagcattctcagaaactgctttgggatgtttcaattgaagttccagtgttgaacattccctttcatagagcaggtttgaaacactctttttgtactatctggaagtggacatttggagcgctttcaggtctacggtgaaaaaggagatatcttccaataaaaactagatagaagcaatgtcagaacttttttcatgatgtatctactcagctaacagagttgaacctttcttttgagagagcagttttgaaacactctttttgtggaatatgcaagtgggtattaggccagcttggaggatttcgttggaaacgggaatacgtataaaaagcagacagcagcattgtcagaaactactttgtgatgtttgcattcaagtcacagaattgaacactccctttcacagagcaggtttgaaacactctttttgtagtgtctgtaagtgaacatatggattgctttcaggcctaaggtgaaaaaggaaatatcttcccataaaaactagacagaagcattctcagaaacttgttcgtgatgtgtgccctctactgacagagttgaacctttctttgcaaagagcagctttgaaacacactttttgtagaatctgcaagaggatatttggatagcttggaggatttcgttggaaacgggtatgtcttcagataaactctagacagaagcattctcagaaacttctttgggatgttgcattcaagtcacagagtagaacattcccattcatagagcagatttgaaacactctttttgtagtatctggaagtggacatttggagcgctttcaggcctatgttgaaaaaggaaatatcttcccataaaaactagacagaagcattctcagaaacttatttgtgatgtgtttgctcaactaacaggattgaaccatcgttttgaaggagcagttttgaaacactgttttcgtggaatctgcaagtggatatttggctagctttgaggatttcgttggaaacgggattacatataaaaaggagacagcagcattctcagaaacttctttgtgatgtttgcattcaattcacagagttgagcattccctttcatagagcaggttggaaacactctttttgtagtatctggatgtggacatttggatcgctttcaggcctatggtgaaaaaggaaatatcttcccatgaaaactagacagaagcattctcagaaacttatttgtgatgtgtgccctcaactgacagtgttgaacctttgttttgatagagcagttctgaaacacactttttgtaaaatctgcaagaggatatttggatagctttgaggatttcgttggaaacgggaatgtcttcatgtaaactctagacagaagcattctcagaaactgctttgggatgtttcaattgaagtcccagtgttgaacattccctttcatagagcaggtttgaaacattctttttgtactatctggaagtggacatttagagcgctttcaggtctacggtgaaaaaggagatatcttccaataaaaactagatagaagcaatgtcagaacttttttcatgatgtatctactcagcaaacagagttgaacctttcttttgagagagcagttttgaaacactctttttgtggaatatgcaagtgggtattaggccagcttggaggatttcgttggaaacgggaatacgtataaaaagcagacagcagcattgtcagaaactactttgtgatgtttgcattcaagtcacagaattgaacactccctttcacagagcaggtttcaaacactgtttttgtagtgtctgtaagtgaacatatggattgctttcaggcctaaggtgaaaaaggaaatatcttcccataaaaactagacagaagcattctcagaaacttgtttgtgatgtgtgccctctactgacagagttgaacctttctttgcaaagagcagttttgaaacagtctttttgtagaatctgcaagaggatatttggatagctttgaggatttcttgggaaacgggaatgtcttcagataaactctagacagaagcattctcagaaacttctttgggatgtttcaattgaagtcacagtgttgaacattccctttcacagagcaggtttcaaacactctttttgtagtgtctataagtgaacatttggcgtgctttcaggcctaacgtgaaaaaggaaatatcttcccataaaaactagacagaagcattctcagaaacttgttcttgatgtgtcccctctactgacagagttgaacctttctttgcaaagagcagctttgaaacactctttttgtagaatctgcaagaggatatttggatagcttggaggatttcgttggaaacgggtatgtcttcagataaactctagacagaagcattctcagaaacttctttgggatgttgcattcaagtcacagagtagaacattcccattcatagagcagatttgaaacactctttttgtagtatctggaagtggacatttggagcgctttcaggcctatgttgaaaaaggaaatatcttcccataaaaactagacggaagcattctcagaaacttatttgtgatgtgtttgctcaactaacaggattgaaccatcgttttgaaggagcagttttgaaacactgttttcgtggaatctgcaagtggatatttggctagctttgaggatttcgttggaaacgggattacatataaaaaggagacagcagcattctcagaaacttctttgtgatgtctgcattcaattcacagagttgagcattccctttcctagagcacgttggaaacactctttttgtagtatctggatgaggacatttggagcgctttcaggcgtatggtgaaaaaggaaatatcttcccgtaaaaactagacagaagcattctcagaaatttatttgtgatgtgtgccctcaactaacagagttgaacctttcttttgatagagcagttttgaaacactctttttgtaaaatctgcaagaggatatttggatagctttgaggatttcgttgcaaacgggaatggcttcatataaactctagacagaagcattctcagaaacttcgttgggatgttttgattgaagtcccagtgttgaacattcccttttatagagcaggttggaaacactctttctgcattccctggaagtggacatttggagcgctttcaggacgacggtgaaaatggaaatatcttccaataaaatctagatagaagcaacgtcagaaacttttatgtgatggatctactcagctaacagagttgaacctttcttttgagagagcagttttgcaacactctttttgtggaatatgcaagtggatattagggcagctttgaggatttcgttggaaacgggaatacatgtaaaaagcagacagcagcgttctcagaaacttctttgtgatgtttgcattgaagtcacagagttgaacattccctttgagagagcaggtttgaaacacgccttttgtcatatctggaagtgtccattcggagcgcattcaggcttgtgttgaaaaaggaaatatcctcccataaaaactagacagaagcattctcagaaacttatctgtgatgtatgtactcaactaacagaactaaaccatcgttttgaaggagcagttttgaaacactctttttgcggaatctgcaagtggatatttggctagctgggaggatttcgttggaaacgggattacatacaaaaagcagagagcagcattctcagaaacttctttgtgatgtttgcattcaagtcacagagttgaacattccctttcatagagcaggtttgaaacactctttttgtagtatctggatgtggacatttggatcgctttcaggcctatggtgaaaaaggaaatatcttcccatgaaaactagacagaagcattctcagaaacttatttgtgatgtgtgccctcaactgacagtgttgaacctttgttttgatagagcagttctgaaacacactttttgtaaaatctgcaagaggatatttggatagctttgaggatttcgttggaaacgggaatgtcttcatgtaaactctagacagaagcattctcagaaactgctttgggatgtttcaattgaagtcccagtgttgaacattccctttcataggagcaggtttgaaacactctttttgtactatctggaagtggacatttggagcgctttcaggtctacggtgaaaaaggagatatcttccaataaaaactagatagaagcaatgtcagaacttttttcatgatgtatctactcagcaaacagagttgaacctttcttttgagagagcagttttgaaacactctttttgtggaatatgcaagtgggtattaggccagcttggaggatttcgttggaaacgggaatacgtataaaaagcagacagcagcattgtcagaaactactttgtgatgtttgcattcaagtcacagaattgaacactccctttcacagagcaggtttgaaacactctttttgtagtgtctgtaagtgaacatttggattgctttcaggcctaaggtgaaaaaggaaatatcttcccataaaaactagacagaagcattctcagaaacttgtttgtgatgtgtgccctctactgacagagttgaacctttctttgcaaagagcagttttgaaacactctttttgtagaatctgcaagaggatatttggatagctttgaggatttcttgggaaacgggaatgtcttcagataaactctagacagaagcattctcagaaacttctttgggatgtttcaattgaagtcacagtgttgaacattccctttcacagagcaggtttgaaacactctttttgtagtgtctataattgaacatttggcgtgctttcaggcctaacgtgaaaaaggaaatatcttcccataaaaactagacagaagcattctcagaaacttggtttgtgatgtgtgccctctactgacagagttgaacctttctttgcaaagagcagctttgaaacactctttttgtagaatctgcaagaggatatttggatagctttgaggatttcgttggaaacgggtatgtcttcagataaactctagacagaagcattctcagaaacttctttgggatgttgcattcaagtcacagagtagaacattcccattcatagagcagatttgaaacactctttttgtagtatctggaagtggacatttggagcgctttcaggcctatgttgaaaaaggaaatatcttcccataaaaactagacggaagcattctcagaaacttacttgtgatgtgttttctcaactaacagaattgaaccatcgttttgaaggagcagttttgacacactgttttcgtggaatctgcaagtggatatttggctagctttgaggatttcgttggaaacgggattacatataaaaaggagacagcagcattctcagaaacttctttgtgatgtctgcattcaaatcacagagttgagcattccctttcatagagcaggttggaaacactctttttgtagtatctggatgaggacatttggagcgctttcaggcctatggtgaaaaaggaaatatcttcccgtaaaaactagacagaagcattctcagaaatttatttgtgatgtgtgccctcaactaacagagttgaacctttcttttgatagagcagttttgaaacactctttttgtaaaatctgcaagaggatatttggatagctttgaggatttcgttgcaaacgggaatggcttcatataaactctagacagaagcattctcagaaacttcgttgggatgtttcgattgaagtcccagtgttgaacattcccttttatagagcaggttggaaacactctttctgcattccctggaagtggacaattggagcgctttcaggacgacggtgaaaatggaaatatcttccaataaaatctggatagaagcaatgtcagaaacttttatgtgatggatctactcagctaacagagttgaacctttcttttgagagagcagttttgcaacactctttttgtggaatatgcaagtggatattagggcagctttgaggatttcgttggaaacgggaatacatgtaaaaagcagacagcagcattctcagaaacttctttgtgatgtttgcattgaagtcacagagttgaacattccctttgagagagcaggtttgaaacacgccttttgtcatatctggaagtgtccattcggagcgcattcaggcttgtgttgaaaaaggaaatatcctcccataaaaactagacagaagcattctcagaaacttatctgtgatgtatgcactcaactaacagaactaaaccatcgttttgaaggagcagttttgaaacactctttttgcggaatctgcaagtggatatttggctagctgggaggatttcgttggaaacgggattacatacaaaaagcagacagcagcattctcagaaacttctttgtgatgtttgcattcaagtcacagagttgagcattccctttcatagagcaggttggaaacactctttttgtagtatctggatgtggacatttggatcgctttcaggcgtatggtgaaaaaggaaatatcttcccatgaaaactagacagaagcattctcagaaatttatttgtgatgtgtgccgtcaactaacagagttgaacctttcttttgatagagcagttttgaaagactctttttgtaaaatctgcaagaggatatttggatagctttgaggatttcgttgcaaacgggaatggcttcatataaactctagacagaagcattctcagaaacttcgttgggatgtttcgattgaagtcccagtgttgaacattcccttttatagagcaggttggaaacactctttctgcattccctggaagtggacatttggagcgctttcaggacgacggtgaaaatggaaatatcttccaagcaaaatctagatagaagcaatgtcagaaacttttatgtgatggatctactcagctaacagagttgaacctttcttttgagagagcagttttgcaacactctttttgtggaatatgcaagtggatattagggcagctttgaggatttcgttggaaacgggaatacatgtaaaaagcagacagcagcattctcagaaacttctttgtgatgtttgcattgaagtcacagagttgaacattccctttgagagagcaggtttgaaacacgccttttgtcatatctggaagtgtccattcggagcgcattcaggcttgtgttgaaaaaggaaatatcctcccataaaaactagacagaagcattctcagaaacttatctgtgatgtatgtactcaactaacagaactaaaccatcgttttgaaggagcagttttgaaacactctttttgcggaatctgcaagtggatatttggctagctgggaggatttccgttggaaacgggattacatacaaaaagcagacagcagcattctcagaaacttatttgtgatgtgtgccctcaactgacagtgttgaacctttgttttgatagagcagttctgaaacacactttttgtaaaatctgcaagaggatatttggatagctttgaggatttcgttggaaacgggaatgtcttcatgtaaactctagacagaagcattctcagaaactgctttgggatgtttcaattgaagtcccagtgttgaacattccctttcatagagcaggtttgaaacactctttttgtactatctggaagtggacatttggagcgctttcaggtctacggtgaaaaaggagatatcttccaataaaaactagatagaagcaatgtcagaacttttttcatgatgtatctactcagcaaacagagttgaacctttcttttgagagagcagttttgaaacactctttttgtggaatatgcaagtgggtattaggccagcttggaggatttcgttggaaacgggaatacgtataaaaagcagacagcagcattgtcagaaactactttgtgatgtttgcattcaagtcacagaattgaacactccctttcacagagcaggtttgaaacactctttttgtagtgtctgtaagtgaacatttggattgctttcaggcctaaggtgaaaaaggaaatatcttcccataaaaactagacagaagcattctcagaaacttgtttgtgatgtgtgccctctactgacagagttgaacctttctttgcaaagagcagttttgaaacactctttttgtagaatctgcaagaggatatttggatagctttgaggatttcttgggaaacgggaatgtcttcagataaactctagacagaagcattctcagaaacttctttgggatgtttcaattgaagtcacagtgttgaacattccctttcacagagcaggtttgaaacactctttttgtagtgtctataattgaacatttggcgtgctttcaggcctaacgtgaaaaaggaaatatcttcccataaaaactagacagaagcattctcagaaacttgttcgtgatgtgtgccctctactgacagagttgaacctttctttgcaaagagcatctttgaaacactctttttgtagaatctgcaagaggatatgtggatagctttgaggatttcgttggaaacgggtatgtcttcagataaactctagacagaagcattctcagaaacttctttgggatgtttcaattgaagtcacagtgttgaacattccctttcacagagcaggtttgaaacactctttttgtagtgtctataagtgaacatttggcgtgctttcaggcctaaggtgaaaaaggaaatatcttcccataaaaactagacagaagcattctcagaaacttgttcgtgatgtgtgccctctactgacagagttgaacctttctttgcaaagagcagctttgaaacactctttttgtagaatctgcaagaggatatttggatagctttgaggatttcgttggaaacgggtatgtcttcagataaactctagacagaagcattctcagaaacttctttgggatgttgcattcaagtcacagagtagaacattcccattcatagagcagatttgaaacactctttttgtagtatctggaagtggacatttggagcgctttcaggcctatgttgaaaaaggaaatatcttcccataaaaactagacagaagcattctcagaaacttacttgtgatgtgtttgctcaactaacagaattgaaccatcgttttgaaggagcagttttgaaacactgttttcgtggaatctgcaagtggatatttggctagctttgaggatttcgttggaaacgggattacatataaaaaggagacagcagcattctcagaaacttctttgtgatgtctgcattcaagtcacagagttgagcattccctttcatagagcaggttggaaacactctttttgtagtatctggatgaggacatttggagcgctttcaggcatatggtgaaaaaggaaatatcttcccgtaaaaactagacagaagcattctcagaaatttatttgtgttgtgtgccctcaactaacagagttgaacctttcttttgatagagcagttttgaaacactctttttgtaaaatctgcaagaggatatttggatagctttgaggatttcgttgcaaacgggaatggcttcatataaactctagacagaagcattctcagaaacttcgttgggatgtttcgattgaagtcccagtgttgaacattcccttttatagagcaggttggaaacactctttctgcattccctggaagtggacatttggagcgctttcaggacgacggtgaaaatggaaatatcttccaagaaaatctagatagaagcaatgtcagaaacttttatgtgatggatctactcagctaacagagttgaacctttcttttgagagagcagttttgcaacactctttttgtggaatatgcaagtggatattagggcagctttgaggatttcgttggaaacgggaatacatgtaaaaagcagacagcagcattctcagaaacttctttgtgatgtttgcattgaagtcacagagttgaacattccctttgagagagcaggttggaaacacgccttttgtcatatctggaagtgtccattcggagcgcattcaggcttgtgttgaaaaaggaaatatcctcccataaaaactagacagaagcattctcagaaacttatctgtgatgtatgtactcaactaacagaactaaaccatcgttttgaaggagcagttttgaaacactctttttgcggaatctgcaagtggatatttggctagctgggaggatttcgttggaaacgggattacatacaaaaagcagacagcagcattctcagaaactactttgtgatgtttgcattcaagtcacagagttgaacattccctttcatagagcaggtttgaaacactctttttgtagtatctggatgtggacatttggatcgctttcaggcctatggtgaaaaaggaaatatcttcccatgaaaactagacagaagcattctcagaaatttatttgtgatgtgtgccctcaactaacagagttgaacctttcttttgatagagcagttttgaaacactctttttgtaaaatctgcaagaggatatttggatagctttgaggatttcgttgcaaacgggaatggcttcatatacactctagacagaagcattctcagaaacttcgttgggatgtttcgattgaagtcccagtgttgaacattcccttttatagagcaggttggaaacactctttctgcattccctggaagtggacatttggagcgctttcaggacgacggtgaaaatggaaatatcttccaagaaaatctagatagaagcaacgtcagaaacttttctgtgatggatctactcagctaacagagttgaacctttcttttgagagagcagttttgcaacactctttttgtggaatatgcaagtggatattagggcagctttgaggatttcgttggaaacgggaatacatgtaaaaagcagacagcagcattctcagaaacttctttgtgatgtttgcattgaagtcacagagttgaacattccctttgagagagcaggtttgaaacacgccttttgtcatatctggaagtgtccattcggagcgcattcaggcttgtgttgaaaaagggaatatcctcccataaaaactagacagaagcattctcagaaacttatctgtgatgtatgtactcaactaacagaactaaaccatcgttttgaaggagcagttttgaaacactctttttgcggaatctgcaagtggatatttggctagctgggaggatttcgttggaaacgggattacatacaaaaagcagacagcagcattctcagaaacttctttgtgatgtttgcattcaagtcacagagttgaacattccctttcatagagcaggtttgaaacactctttttgtagtatctggatgtggacatttggatcgctttcaggcctatggtgaaaaaggaaatatcttcccatgaaaactagacagaagcattctcagaaacttatttgtgatgtgtgccctcaactgacagtgttgaacctttgttttgatagagcagttctgaaacacactttttgtaaaatctgcaagaggatatttggatagctttgaggagttcgttggaaacgggaatgtcttcatgtaaactctagacagaagcattctcagaaactgctttgggatgtttcaattgaagtcccagtgttgaacattcccattcatagagcaggtttgaaacactctttttctactatctggaagtcgacatttggagcgctttcaggtctacggtgaaaaaggagatatcttccaataaaaactagatagaagcaatgtcagaaactttttcatgatgtatctactcagctaacagagttgaatctttcttttgagagagcagttttaaaactgtctttttggggaatatgcaagtggatattaagccagcttggaggatttcgttggaaacgggaatccatataaaaagcagacagcagcattctcagaaacttctttgtgatgtttgcattgaagtcccagatgtgaacattccctttcataaagcaggtttgaaacacgccttttgtcatatctggaagttgtccatttggagggcattccggcttgtgttgaaaaaggaaatatcctcccataaaaactagatagaagcattctcagaaacttatttgtgatgtgtgtactcaactaacagaattgaaccatcgttttgaaagagcagttttgaaacactccttttgtggaatctgcaagtggatatttgtctagctttgaggatttcgttggaaacgggattacatataaaaagcagacagcagcattctcagaaacttctttgtgatgtctgcattcaattcacagagttgagcattccctttcatagagcaggttggaaacactctttttgtagtatctggatgaggacatttggagcgctttcaggcgtatggtgaaaaaggaaatatcttcccgtaaaaactagacagaagcattctcagaagtttatttgtgatgtgtgccctcagctaacagagttgaacctttcttttgatagagcagttttgaaacactctttttgtaaaatctgcaagaggatatttggatagctttgaggatttcgttgcaaacgggaatggcttcatataaactctagacagaagcattctcagaaacttcgttgggatgtttcgattgaagtcccagtgttgaacattcccttttatagagcaggttggaaacactctttctgcattccctggaagtggacatttggagcgctttcaggacgacggtgaaaatggaaatatcttccaagaaaatctagatagaagcgatgtcagaaacttttatgtgatggatctactcagctaacagagttgaacctttcttttgagagagcagttttgcaacactctttttgtggaatatgcaagtggatattagggcagctttgaggatttcgttggaaacgggaatacatgtaaaaagcagacagcagcattctcagaaacttctttgtgatgtttgcattgaagtcacagagttgaacattccctttgagagagcaggtttgaaacacgccttttgtcatatctggaagtgtccattcggagcgcattcaggcttgtgttgaaaaaggaaatatcctcccataaaaactagacagaagcattctcagaaacttatctgtgatgtatgtactcaactaacagaactaaaccatcgttttgaaggagcagttttgaaacactctttttgcggaatctgcaagtggatatttggctagctgggaggatttcgttggaaacgggattacatacaaaaagcagacagcagcattctcagaaacttctttgtgatgtttgcattcaagtcacagagttgaacattccctttcatagagcaggtttgaaacactctttttgtagtatctggatgtggacatttggatcgctttcaggcctatggtgaaaaaggaaatatcttcccatgaaaactagacagaagcattctcagaaacttatttgtgatgtgtgccctcaactgacagtgttgaacctttgttttgatagagcagttctgaaacacactttttgtaaaatctgcaagaggatatttggatagctttgaggatttcgttggaaacgggaatgtcttcatgtaaactctagacagaagcattctcagaaactgctttgggatgtttcaattgaagtcccagtgttgaaccttcccattcatagagcaggtttgaaacactctttttgtactatctggaagtggacattttgagcgctttcaggtctacggtgaaaaaggagatatcttccagtaaaaactagatagaagcaatgtcagaacttttttcatgatgtatctactcagcaaacagagttgaacctttcttttgagagagcagttttgaaacactctttttgtggaatatgcaagtgggtattaggccagcttggaggatttcgttggaaacgggaatacgtataaaaagcagacagcagcattgtcagaaactactttgtgatgtttgcattcaagtcacagaattgaacactccctttcacagagcaggtttgaaacactctttttgtagtgtctgtaagtgaacatttggattgctttcaggcctatggtgaaaaaggtaatatcttcccataaaaactagacagaagcattctcagaaacttgtttgtgatgtgtgccctctactgacagagttgaacctttctttgcaaagagcagttttgaaacactctttttgtagaatctgcaagaggatatttggatagctttgaggatttcttgggaaacgggaatgtcttcagataaactctagacagaagcattctcagaaacttctttgggatgtttcaattgaagtcacagtgttgaacattccctttcacagagcaggtttgaaacactctttttgtagtgtctataagtgaacatttggcgtgctttcaggcctaacgtgaaaaaggaaatatcttcccataaaaactagacagaagcattctcagaaacttgttcgtgatgtgtgccctctactgacagagttgaacctttctttgcaaagagcagctttgaaacactctttttgtagaatctgcaagaggatatttggatagcttggaggatttcgttggaaacgggtatgtcttcagataaactctagacagaagcattctcagaaacttctttgggatgttgcattcaagtcacagagtagaacattcccattcatagagcagatttgaaacactctttttgtagtatctggaagtggacatttggagcgctttcaggcctatgttgaaaaaggaaatatcttcccataaaaactagacggaagcattctcagaaacttacttgtgatgtgtttgctcaactaacaggattgaaccatcgttttgaaggagcagttttgaaacactgttttcgtggaatctgcaagtggatatttggctagctttgaggatttcgttggaaacgggattacatataaaaaggagacagcagcattctcagaaacttctttgtgatgtctgcattcaattcacagagttgagcattccctttcatagagcaggttggaaaccctctttttgtagtatctggatgtggacatttggatcgctttcaggcctatggtgaaaaaggaaatatcttcccatgaaaactagacagaagcattctcagaaacttatttgtgatgtgtgcactcaactgacagtgttgaacctttgttttgatagagcagttctgaaacacactttttgtaaaatctgcaagaggatatttggatagctttgaggatttcgttggaaacgggaatgtcttcatgtaaactctagacagaagcattctcagaaactgctttgggatgtttcaattgaagtcccagtgttgaacattcccattcatagagcaggtttgaaacactctttttctactatctggaagtggacatttggagcgctttcaggtctacggtgaaaaaggagatatcttccaataaaaactagatagaagcaatgtcagaacttttttcatgatgtatctactcagcaaacagagttgaacctttcttttgagagagcagttttgaaacactctttttgtggaatatgcaagtgggtattaggccagcttggaggatttcgttggaaacgggaatacgtataaaaagcagacagcagcattgtcagaaactactttgtgatgtttgcattcaagtcacagaattgaacactccctttcacagagcaggtttgaaacactctttttgtagtgtctgtaagtgaacatttggattgctttcaggcctaaggtgaaaaagggaaatatcttcccataaaaactagacagaagcattctcagaaacttgtttgtgatgtgtgccctctactgacagagttgaacctttctttgcaaagagcagttttgaaacactctttttgtagaatctgcaagaggatatttggatagctttgaggatttcttgggaaacgggaatgtcttcagataaactctagacagaagcattctcagaaacttctttgggatgtttcaattgaagtcacagtgttgaacattccctttcacagagcaggtttgaaacactctttttgtagtgtctataagtgaacatttggcgtgctttcaggcctaacgtgaaaaaggaaatatcttcccataaaaactagacagaagcattctcagaaacttgttcgtgatgtgtgccctctactgacagagttgaacctttctttgcaaagagcagctttgaaacacactttttgtagaatctgcaagaggatatttggatagctttgaggatttcgttggaaacgggtatgtcttcagataaactctagacagaagcattctcagaaacttctttgggatgttgcattcaagtcacagagtagaacattcccattcatagagcagatttgaaacactctttttgtagtatctggaagtggacatttggagcgctttcaggcctatgttgaaaaaggaaatatcttcccataaaaactagacggaagcattctcagaaacttatttgtgatgtgtttgctcaactaacaggattgaaccatcgttttgaaggagcagttttgaaacactgttttcgtggaatctgcaagtggatatttggctagctttgaggatttcgttggaaacgggattacatatacaaaggagacagcagcattctcagaaacttctttgtgatgtctgcattcaattcacagagttgagcattccctttcatagagcaggttggaaacactctttttgtagtatctggatgaggacatttggagcgctttcaggcgtatggtgaaaaaggaaatatcttcccgtaaaaactagacagaagcattctcagaagtttatttgtgatgtgtgccctcaactaacagagttgaacctttcttttgatagagcagttttgaaacactctttttgtaaaatctgcaagaggatatttggatagctttgaggatttcgttgcaaacgggaatggcttcatataaactctagacagaagcattctcagaaacttcgttgggatgtttcgattgaagtcccagtgttgaacattcccttttatagagcaggttggaaacactctttctgcattccctggaagtggacatttggagcgctttcaggacgacggtgaaaatggaaatatcttccaagaaaatctagatagaagcaacgtcagaaacttttctgtgatggatctactcagctaacagagttgaacctttcttttgagagagcagttttgcaacactctttttgtggaatatgcaagtggatattagggcagctttgaggatttcgttggaaacgggaatacatgtaaaaagcagacagcagcgttctcagaaacttctttgtgatgtttgcattgaagtcacagagttgaacattccctttgagagagcaggtttgaaacacgccttttgtcatatctggaagtgtccattcggagcgcattcaggcttgtgttgaaaaaggaaatatcctcccataaaaactagacagaagcattctcagaaacttatctgtgatgtatgtactcaactaacagaactaaaccatcgttttgaaggagcagttttgaaacactctttttgcggaatctgcaagtggatatttggctagctgggaggatttcgttggaaacgggattacatacaaaaagcagacagcagcattctcagaaacttctttgtgatgtttgcattcaagtcacagagttgaacattccctttcatagagcaggtttgaaacactctttttgtagtatctggatgtggacatttggatcgctttcaggcctatggtgaaaaaggaaatatcttcccatgaaaactagacagaagcattctcagaaacttatttgtgatgtgtgccctcaactgacagtgttgaacctttgttttgatagagcagttctgaaacacactttttgtaaaatctgcaagaggatatttggatagctttgaggatttcgttggaaacgggaatgtcttcatgtaaactctagacagaagcattctcagaaactgctttgggatgtttcaattgaagtcccagtgttgaatattccctttcatagagcaggtttgaaacactctttttgtactatctggaagtggacatttggagcgctttcaggtctacggtgaaaaaggagatatcttccaataaaaactagatagaagcaatgtcagaacttttttcatgatgtatctactcagcaaacagagttgaacctttcttttgagagagcagttttgacacagtctttgtggaatatgcaagtgggtattaggccagcttggaggatttcgttggaaacgggaatacgtataaaaagcagacagcagcattgtcagaaactactttgtgatgtttgcattcaagtcacagaattgaacactccctttcacagagcaggtttgaaacactctttttgtagtgtctgtaagtgaacatttggattgctttcaggcctatggtgaaaaaggaaatatcttcccataaaaactagacagaagcattctcagaaacttgtttgtgatgtgtgccctctactgacagagttgaacctttctttgcaaagagcagttttgaaacactctttttgtagaatctgcaagaggatatttggatagctttgaggatttcttgggaaacgggaatgtcttcagataaactctagacagaagcattctcagaaacttctttgggatgtttcaattgaagtcacagtgttgaacattccctttcacagagcaggtttgaaacactctttttgtagtgtgtataagtgaacatttcgcgtgctttcaggcctaacgtgaaaaaggaaatatcttcccataaaaactagacagaagcattctcagaaacttgttcatgatgtgtgccctctactgacagagttgaacctttctttgcaaagagcagctttgaaacactctttttgtagaatctgcaagaggatatttggatagcttggaggatttcgttggaaacgggtatgtcttcagataaactctagacagaagcattctcagaaacttctttgggatgttgcattcaagtcacagagtagaacattcccattcatagagcagatttgaaacactctttttgtagtatctggaagtggacatttggagcgctttcaggcctatgttgaaaaaggaaatatcttcccataaaaactagacggaagcattctcagaaacttatttgtgatgtgtttgctcaactaacaggattgaaccatcgttttgaaggagcagttttgaaacactgttttcgtggaatctgcaagtggatatttggctagctttgaggatttcgttggaaacgggattacatataaaaaggagacagcagcattctcagaaacttctttgtgatgtctgcattcaagtcacagagttgagcattccctttcatagagcaggttggaaacactctttttgtagtatctggatgtggacatttggagcgctttcaggcgtatggtgaaaaaggaaatatcttcccgtaaaaactagacagaagcattctcagaaatttatttgtgatgtgtgccctcaactaacagagttgaacctttcttttgatagagcagttttgaaacactctttttgtaaaatctgcaagaggatatttggatagctttgaggatttcgttgcaaacgggaatggcttcatataaactctagacagaagcattctcagaaacttcgttgggatgtttcgattgaagtcccagtgttgaacattcccttttatagagcaggttggaaacactctttctgcattccctggaagtggacatttggagcgctttcaggacgacggtgaaaatggaaatatcttccaagaaaatctagatagaagcaatgtcagaaacttttatgtgatggatctactcagctaacagagttgaacctttcttttcagagagcagttttgcaacactctttttgtggaatatgcaagtggatattagggcagctttgaggatttcgttggaaacgggaatacatgtaaaaagcagacagcagcattctcagaaacttctttgtgatgtttgcattgaagtcacagagttgaacattccctttgagagagcaggtttgaaacacgccttttgtcatatctggaagtgtccattcggagcgcattcaggcttgtgttgaaaaaggaaatatcctcccataaaaactagacagaagcattctcagaaacttatctgtgatgtatgtactcaactaacagaactaaaccatcgttttgaaggagcaattttgaaacactctttttgcggaatctgcaagtggatatttggctagctgggaggatttcgttggaaacgggattacatacaaaaagcagacagcagcattctcagaaacttatttgtgatgtgtgccctcaactgacagtgttgaacctttgttttgatagagcagttctgaaacacactttttgtaaaatctgcaagaggatatttggatagctttgaggatttcgttggaaacgggaatgtcttcatgtaaactctagacagaagcattctcagaaactgctttgggatgtttcaattgaagtcccagtgttgaacattccctttcatagagcaggtttgaaacactctttttgtactatctggaagtggacatttggagcgctttcaggtctacggtgaaaaaggagatatcttccaataaaaactagatagaagcaatgtcagaacttttttcatgatgtatctactcagcaaacagagttgaacctttcttttgagagagcagttttgaaacactctttttgtggaatatgcaagtgggtattaggccagcttggaggatttcccttggaaacgggaatacgtataaaaagcagacagcagcattgtcagaaactactttgtgatgtttgcattcaagtcacagaattgaacactccctttcacagagcaggtttgaaacactctttttgtagtgtctgtaagtgaacatttggattgctttcaggcctaaggtgaaaaaggaaatatcttcccataaaaactagacagaagcattctcagaaacttgtgtgtgatgtgtgccctctactgacagagttgaacctttcattgcaaagagcagttttgaaacccactttttgtagaatctgcaagaggatatttggatagatttgaggatttcttgggaaacgggaatgtcttcagataaactctagacagaagcattctcagaaacttctttgggatgttgcattcaagtcacagagtagaacattcccattcatacagcagatttgaaacactctttttgttgtatctggaagtggatatttggagcgctttcaggtctacggtgaaaaaggagatatcttccaataaaaactagataaaagcaatgtcagaaactttatcatgatgtatctactcagccaacagagttgaacctttcttttgagagagcagttttgaaacactctttttgtggaatatgcaagtggatattaggtcagcttggaggatttcgttggaaacgggaatacgtataaaagcacacagcagcattgtcagaaacttctttgtgatgtttgcattcaagtcacagaattcaacactccctttcacagagcagatttgaaacactctttttgtagtgtctgtaagtgaacatttggattgctttcagggctaaggtgaaaaaggaaatatcttcccataaaaacttgacagaagcattctcagaaactcgtttgtgatgtgtgccctctactgacggagttgaacctttctttgcaatgagcagttttgaaaccatctttttgtagaatctgcaagaggatatttggatagctttgaggatttcttgggaaacgggaatgtcttcagataaactctagacagcagcattctcagaaacttctttgggatgtttcaattgaagtcacagtgttgaacattccctttcacagagcaggtttgaaacactctttttgtagtgtctataagtgaacatttggcgtgttttcaggcctaacgtgaaaaaggaaatatcttcccataaaaactagacagaagcattctcagaaacttgttcgtgatgtgtgccctctacagacagagttgaacctttctttgcaaagagcagctttgaaacacactttttgtagaatctgcaagaggatatttggatagcttggaggatttcgttggaaacgggtatgtcttcagataaactctagacagaagcattctcagaaacttctttgggatgttgcattcaagtcacagagtagaacattcccattcatagagcagatttgaaacactctttttgtagtatctggaagtggacatttggagcgctttcaggcctatgttgaaaaaggaaatatcttcccataaaaactagacggaagcattctcagaaacttacttgtgatgtgtttgctcaactaacagaattgaaccatcgttttgaaggagcagttttgaaacactgttttcgtagaatctgcaagtggatatttggctagctttgaggatttcgttggaaacgggattacatataaaaaggagacagcagcattctcagaaacttctttgtgatgtctgcattcaagtcacagagttgagcattccctttcatagagcaggttggaaacactctttttgtagtatctggatgaggacatttggagcgctttcaggcgtatggtgaaaaaggaaatatcttcccgtaaaaactagacagaagattctcagaaatttatttgtgatgtgtgccctcaactaacagagttgaacctttcttttgatagagcagttttgaaacactctttttgtaaaatctgcaagaggatatttggatagctttgaggatttcgttgcaaacgggaatggcttcgtataaactctagacagaagcattctcagaaacttcgttgggatgtttcgattgaagtcccagtgttgaacattcccttttatagagcaggttggaaacactctttctgcattccctggaagtggacatttggagcgctttcaggacgacggtgaaaatggaaatatcttccaagcaaaatctagatagaagcaatgtcagaaacttttctgtgatggatctactcagctaacagagttgaacctttcttttgagagagagttttgcaacactctttttgtggaatatgcaagtgcatattagggcagctttgaggatttcgttggaaacgggaatacatgtaaaaagcagacagcagcattctcagaaacttctttgtgatgtttgcattgaagtcacagagttgaacattccctttgagagagcaggtttgaaacacgccttctgtcatatctggaagtgtccattcggaacgcattcaggcttgtgttgagaaaggaaatatcctcccataaaaactagacagaagcattctgagaaacttatctgtgatgtatgtactcaactaacagaactaaaccaccgttttgaagaagcagtgttgaaacactctttttgcggaatctgcaagtggatatttgcctagcttggaggatttcgttggaaacgggattacatataaaaaccagacagcagcattctcatgaacttctttgtgatgtttgcattcaagtcacagagttgaacattccctttcatagaacaggtttgaaacactctttttgtagtatctggatgtggacatttggatcgctttcaggcctatggtgaaaaaggaaatatcttcccatgaaaactagacagaagcattctcagaagtttatttgtgatgtgtgccctcaactaacagagttgaacctttcttttgatagagcagttttgaaacactctttttgtaaaatctgcaagaggatatttggatagctttgaggatttcgttgcaaacgggaatggcttcatataaactctagacagaaagcattctcagaaacttcgtcgggatgtttcgattgaagtcccagtgttgaacattcccttttatagagcaggttggaaacactctttctgcattccctggaagtggacaattggagcgctttcaggacgacggtgaaaatggaaatatcttccaataaaatctggatagagcaaccgtcagaaacttttctgtgatggatctactcagctaacagagttgaacctttcttttgagagagcagttttgcaacactctttttgtggaatatgcaagtggatattagggcagctttgaggatttcgttggaaacgggaatacatgtaaaaagcagacagcagcattctcagaaacttctttgtgatgtttgcattgaagtcacagagttgaacattccctttgagagagcaggtttgaaacacgccttttgtcatatctggaagtgtccattcggagcgcattcaggcttgtgttgaaaaaggaaatatcctcccataaaaactagacagaagcattctcagaaacttatttgtgatgtatgtactcaactaacagaactaaaccatcgttttgaaggagcagttttgaaacactctttttgcggaatctgcaactggatatttggctagcttggaggatttcgttggaaacgggattacatacaaaaagcagacagcagcattctcagaaacttctttgtgatgtttgcattcaagtcacagagttgaacattccctttcatagagcaggtttgaaacactctttttgtagtatctggatgtggacatttggatcgctttcaggcctatggtgaaaaaggaaatatcttcccatgaaaactagacagaagcattctcagaaacttatttgtgatgtgtgccctcaactgacagtgttgaacctttgttttgatagagcagttctgaaacacactttttgtaaaatctgcaagaggatatttggatagctttgaggatttcgttggaaacgggaatgtcttcatgtaaactctagacagaagcattctcagaaactgctttgggatgtttcaattgaagtcccagtgttgaacattccctttcatagagcaggtttgaaacactctttttgtactatctggaagtggacatttggagcgctttcaggtctacggtgaaaaaggagatatcttccaataaaaactagatagaagcaatgtcagaacttttttcatgatgtatctactcagcaaacagagttgaacctttcttttgagagagcagttttgaaacactctttttgtggaatatgcaagtgggtattaggccagcttggaggatttcgttggaaacggcaatacgtataaaaagcagacagcagcattgtcagaaactactttgtgatgtttgcattcaagtcacagaattgaacactccctttcacagagcaggtttgaaacactctttttgtagtgtctgtaagtgaacatttggattgctttcaggcctaaggtgaaaaaggaaatatcttcccataaaaactagacagaagcattctcagaaacttgtttgtgatgtgtgccctctactgacagagttgaacctttctttgcaaagggcagttttgaaacactctttttgtagaatctgcaagaggatatttggatagctttgaggatttcttgggaaacgggaatgtcttcagataaactctagacagaagcattctcagaaacttctttgggatgtttcaattgaagtcacagtgttgaacattccctttcacagagcaggtttgaaacactctttttgtagtgtctataagtgaacatttggcgtgctttcaggcctaacgtgaaaaaggaaatatcttcccataaaaactagacagaagcattctcagaaacttgttcttgatgtgtcccctctactgacagagttgaacctttctttgcaaagagcagctttgaaacactctttttgtagaatctgcaagaggatatttggatagcttggaggatttcgttggaaacgggtatgtcttcagataaactctagacagaagcattctcagaaacttctttgggatgttgcattcaagtcacagagtagaacattcccattcatagagcagatttgaaacactctttttgtagtatctggaagtggacatttggagcgctttcaggcctatgttgaaaaaggaaatatcttcccataaaaactagacggaagcattctcagaaacttatttgtgatgtgtttgctcaactaacaggattgaaccatcgttttgaaggagcagttttgaaacactgttttcgtggaatctgcaagtggatatttggctagctttgaggatttcgttggaaacgggattacatataaaaaggagacagcagcattctcagaaacttctttgtgatgtctgcattcaattcacagagttgagcattccctttcatagagcacgttggaaacactctttttgtagtatctggatgaggacatttggagcgctttcaggcgtatggtgaaaaaggaaatatcttccggtaaaaactagacagaagcattctcagaagtttatttctgatgtgtgccctcaactaacagagttgaacctttcttttgatagagcagttttgaaacactctttttgtaaaatctgcaagaggatatttggatagctttgaggatttcgttgcaaacgggaatggcttcatataaactctagacagaagcattctcagaaacttcgtcgggatgtttcgattgaagtcccagtgttgaacattcccttttatagagcaggttggaaacactctttctgcattccctggaagtggacatttggagcgctttcaggacgacggtgaaaatggaaatatcttccaataaaatctggatagaagcaatgtcagaaacttttctgtgatggatctactcagctaacagagttgaacctttcttttgagagagcagttttgcaacactctttttgtggaatatgcaagtggatattagggcagctttgaggatttcgttggaaacgggaatacatgtaaaaagcagacagcagcattctcagaaacttctttgtgatgtttgcattgaagtcacagagttgaacattccctttgagagagcaggtttgaaacacgccttttgtcatatctggaagtgtccattcggagcgcattcaggcttgtgttgaaaaaggaaatatcctcccataaaaactatacagaagcattctcagaaactgatttgtgatgtatgtactcaactaacagaactaaaccatcgttttgaaggagcagttttgaaacactctttttgcggaatctgcaagtggatatttggctagctgggaggatttcgttggaaacgggattacatacaaaaagcagacagcagcattctcagaaacttctttgtgatgtttgcattcaagtcacagagttgaacattccctttcatagagcaggtttgaaacactctttttgtagtatctggatgtggacatttggatcgctttcaggcctatggtgaaaaaggaaatatcttcccatgaaaactagacagaagcattctcagaaacttatctgtgatgtgtgccctcaactgacagtgttgaacctttgttttgatagagcagttctgaaacacactttttgtaaaatctgcaagaggatatttggatagctttgaggatttcgttggaaacgggaatgtcttcatgtaaactctacacagaagcattctcagaaactgctttgggatgtttcaattgaagtcccagtgttgaacattcccattcatagagcaggtttgaaacactctttttgtactatctggaagtggacatttggagcgctttcaggtctacggtgaaaaaggagatatcttccaataaaaactagatagaagcaatgtcagaacttttttcatgatgtatctactcagcacacagagttgaacctttcttttgagagagcagttttgaaacactctttttgtggaatatgcaagtgggtattaggccagcttggaggatttcgttggaaacgggaatacgtataaaaagcagacagcagcattgtcagaaactactttgtgatgtttgcattcaagtcacagaattgaacactccctttcacagagcaggtttgaaacactctttttgtagtgtctgtaagtgaacatttggattgctttcaggcctaaggtgaaaaaggaaatatcttcccataaaaactagacagaagcattctcagaaacttgtttgtgatgtgtgccctctactgacagagttgaacctttctttgcaaagagcagttttgaaacactctttttgtagaatctgcaagaggatatttggatagctttgaggatttcttgggaaacgggaatgtcttcagaaaaactctagacagaagcattctcagaaacttctttgggatgtttcaattgaagtcacagtgttgaacattccctttcacagagcaggtttgaaacactctttttgtagtgtctataagtgaacatttggcgtgcttcaggcctaacgtgaaaaaggaaatatcttcccataaaaactagacagaagcattctcagaaacttgttcttgatgtgtcccctctactgacagagttgaacctttctttgcaaagagcagctttgaaacactctttttgtagaatctgcaagaggatatttggatagcttggaggatttcgttggaaacgggtatgtcttcagataaactctagacagaagcattctcagaaacttctttgggatgttgcattcaagtcacagagtagaacattcccattcatagagcagatttgaaacactctttttgtagtatctggaagtggacatttggagcgctttcaggcctatgttgaaaaaggaaatatcttcccataaaaactagacggaagcattctcagaaacttacttgtgatgtgtttgctcaactaacagaattgaaccatcgttttgaaggagcagttttgaaacactgttttcgtggaatctgcaagtggatatttggctagctttgaggatttcgttggaaacgggattacatataaaaaggagacagcagcattctcagaaacttctttgtgatgtctgcattcaaatcacagagttgagcattccctttcatagagcaggttggaaacactctttttgtagtatctggatgaggacatttggagcgctttcaggcgtatggtgaaaaaggaaatatcttcccgtaaaaactagacagaagcattctcagaaatttatttgtgatgtgtgccctcaactaacagagttgaacctttcttttgatagagcagttttgaaacactctttttgtaaaatctgcaagaggatatttggatagctttgaggatttcgttgcaaacgggagtggcttcatataaactctagacagaagcattgtgagaaacttcgttgggatgtttcgattgaagtcccagtgttgaacattcccttttatagagcaggttggaaacactctttctgcattccctggaagtggacatttggagcgctttcaggacgacggtgaaaatggaaatatcttccaagaaaatctagatagaagcaatgtcagaaacttttatgtgatggatctactcagctaacagagttgaacctttcttttgagagagcagttttgcaacactctttttgtggaatatgcaagtggatattagggcagctttgaggatttcgttggaaacgggaatacatgtaaaaagcagacagcagcgttctcagaaacttctttgtgatgtttgcattgaagtcacagagttgaacattccctttgagagagcaggtttgaaacacgccttttgtcatatctggaagtgtccattcggagcgcattcaggcttgtgttgaaaaaggaaatatcctcccataaaaactagacagaagcattctcagaaacttatctgtgatgtatgtactcaactaacagaactaaaccatcgttttgaaggagcagttttgaaacactctttttgcggaatctgcaagtggatatttggctagctgggaggatttcgttggaaacgggattacatacaaaaagcagacagcagcattctcagaaacttctttgtgatgtttgcattcaagtcacagagttgaacattccctttcatagagcaggtttgaaacactctttttgtagtatctggatgtggacatttggatcgctttcaggcctatggtgaaaaaggaaatatcttcccatgaaaactagacagaagcattctcagaaacttatttgtgatgtgtgccctcaactgacagtgttgaacctttgttttgatagagcagttctgaaacacaccttttgtaaaatctgcaagaggatatttggatagctttgaggatttcgttggaaacgggaatgtcttcatgtaaactctacacagaagcattctcagaaactgctttgggatgtttcaattgaagtcccagtgttgaacattcccattcatagagcaggtttgaaacactctttttgtactatctggaagtggacatttggagcgctttcaggtctacggtgaaaaaggagatatcttccaataaaaactagatagaagcaatgtcagaacttttttcatgatgtatctactcagcaaacagagttgaacctttcttttgagagagcagttttgaaacactctttttgtggaatatgcaagtgggtattaggccagcttggaggatttcgttggaaacgggaatacgtataaaaagcagacagcagcattgtcagaaactactttgtgatgtttgcattcaagtcacagaactgaacactccctttcacagagcaggtttgaaacactctttttgtagtgtctgtaagtgaacatttggattgctttcaggcctaaggtgaaaaaggaaatatcttcccataaaaactagacagaagcattctcagaaacttgtttgtgatgtctgccctctactgacagagttgaacctttctttgcaaagagcagttttgaaacactctttttgtagaatctgcaagaggatatttggatagctttgaggatttcttgggaaacgggaatgtcttcagataaactctagacagaagcattctcagaaacttctttgggatgtttcaattgaagtcacagtgttgaacattccctttcacagagcaggtttgaaacactctttttgtagtgtctataattgaacatttggcgtgctttcaggcctaacgtgagaaaggaaatatcttcccataaaaactagacagaagcattctcagaaacttgtttgtgatgtgtgccctctactgacagagttgaacctttctttgcaaagagcagctttgaaacactctttttgtagaatctgcaagaggatatttggatagctttgaggatttcgttggaaacgggtatgtcttcacataaactctagacagaagcattctcagaaacttctttgggatgttgcattcaagtcacagagtagaacattcccattcatagagcagatttgaaacactctttttgtagtatctggaagtggacatttggagcgctttcaggcctatgttgagaaacgaaatatcttcccataaaaactagacggaagcattctcataaactagtttgtgatgtgtgtgcttaactaacagagctgaacctttcttttcattgagcggttttgaaacactctttttgtagaatctgcaagtggatatttggctggctctgaggatttcgttggaaacgggaatacatttaaaaagcagacggcagcattctcagcaacttctttgtgatgtttccattgaagtcccagtgttgaacattccatttgatagagcaggtttgaaacacgccttttgtcatgtctggaagctgtccatttggagcacattccggcttgtgttgaaaaaggaaatatcctctcataaaaactagacagaagcattctcagaaatttatttgtgatgtgtgccctcaactaacagagttgaacctttcttttgatagagcagttttgaaacactctttttgtaaaatctgcaagaggatatttggatagctttgaggatttcgttgcaaacgggaatggcttcatataaactcctagacagaagcattctcagaaacttcgttgggatgtttcgattgaagtcccagtgttgaacattcccttttatagagcaggttggaaacactctttctgcattccctggaagtggacatttggagcgctttcaggacgacggtgaaaatggaaatatcttccaagaaaatctagatagaagcaatgtcagaaacttttatgtgatggatctactcagctaacacagttgaacctttcttttgagagagcagttttgcaacactctttttgtggaatatgcaagtggatattagggcagctttgaggatttcgttggaaacgggaatacatgtaaaaagcagacagcagcattctcagaaacttctttgtgatgtttgcattgaagtcacagagttgaacattccctttgagagagcaggattgaaacacgccttttgtcatatctggaagtgtccattcggagcgcattcaggcttgtgttgaaaaaggaaatatcctcccataaaaagtatacagaagcattctcagaaacttatttgtgatgtatgtactcaactaacagaactaaaccatcgttttgacggagcagttttgaaacactctttttgcggaatctgcaagtggatatttggctagctgggaggatttcgttggaaacgggattacatacaaaaagcagacagcagcattctcagaaacttctttgtgatgtttgcattcaagtcacagagttgaacattccctttcatagagcaggtttgaaacactctttttgtagtatctggatgtggacatttggatcgctttcaggcctatggtgaaaaaggaaatatcttcccatgaaaactagacagaagcattctcagaaacttatttgtgatgtgtgccctcaactgacagtgttgaacctttgttttgatagagcagttctgaaacacactttttgtaaaatctgcaagaggatatttggatagctttgaggatttcgttggaaacgggaatgtcttcatgtaaactctagacagaagcattctcagaaactgctttgggatgtttcaattgaagtcccagtgttgaacattccctttcatagagcaggtttgaaacactctttttgtactatctggaagtggacatttggagcgctttcaggtctacggtgaaaaaggagatatcttccaataaaaactagatagaagcaatgtcagaacttttttcatgatgtatctactcagcaaacagagttgaacctttcttttgagagagcagttttgacacagtctttgtggaatatgcaagtgggtattaggccagcttggaggatttcgttggaaacgggaatacgtataaaaagcagacagcagcattgtcagaaactactttgtgatgtttgcattcaagtcacagaattgaacactccctttcacagagcaggtttgaaacactctttttgtagtgtctgtaagtgaacatttggattgctttcaggcctatggtgaaaaaggaaatatcttcccataaaaactagacagaagcattctcagaaacttgtttgtgatgtgtgccctctactgacagagttgaacctttctttgcaaagagcagttttgaaacactctttttgtagaatctgcaagaggatatttggatagctttgaggatttcttgggaaacgggaatgtcttcagataaactctagacagaagcattctcagaaacttctttgggatgtttcaattgaagtcacagtgttgaacattccctttcacagagcaggtttgaaacactctttttgtagtgtctataagtgaacatttggcgtgctttcaggcctaacgtgaaaaaggaaatatcttcccataaaaactagacagaagcattctcagaaacttgttcgtgatgtgtgccctctactgacagagttgaacctttctttgcaaagagcagctttgaaacacactttttgtagaatctgcaagaggatatttggatagcttggaggatttcgttggaaacgggtatgtcttcagataaactctagacagaagcattctcagaaacttctttgggatgttgcattcaagtcacagagtagaacattcccattcatagagcagatttgaaacactctttttgtagtatctggaagtggacatttggagcgctttcaggcctatgttgaaaaaggaaatatcttcccataaaaactagacggaagcattctcagaaacttatttgtgatgtgtttgctcaactaacaggattgaaccatcgttttgaaggagcagttttgaaacactgttttcgtggaatctgcaagtggatatttggctagctttgaggatttcgttggaaacgggattacatatacaaaggagacagcagcattctcagaaacttctttgtgatgtctgcattcaattcacagagttgagcattccctttcatagagcaggttggaaacactctttttgtagtatctggatgaggacatttggagcgctttcaggcgtatggtgaaaaaggaaatatcttcccgtaaaaactagacagaagcattctcagaagtttatttgtgatgtgtgccctcaactaacagagttgaacctttcttttgatagagcagttttgaaacactctttttgtaaaatctgcaagaggatatttggatagctttgaggatttcgttgcaaacgggaatggcttcatataaactctagacagaagcattctcagaaacttcgttgggatgtttcgattgaagtcccagtgttgaacattcccttttatagagcaggttggaaacactctttctgcattccctggaagtggacatttggagcgctttcaggacgacggtgaaaatggaaatatcttccaagaaaatctagatagaagcaacgtcagaaacttttctgtgatggatctactcagctaacagagttgaacctttcttttgagagagcagttttgcaacactctttttgtggaatatgcaagtggatattagggcagctttgaggatttcgttggaaacgggaatacatgtaaaaagcagacagcagcattctcagaaacttctttgtgatgtttgcattgaagtcacagagttgaacattccctttgagagagcaggtttgaaacacgccttttgtcatatctggaagtgtccattcggagcgcattcaggcttgtgttgaaaaaggaaatatcctcccataaaaactagacagaagcattctcagaaacttatctgtgatgtatgtactcaactaacagaactaaaccatcgttttgaaggagcagttttgaaacactctttttgcggaatatgcaagtggatatttggctagcttggaggatttcgttggaaacgggatgacatacaaaaagcagagagcagcattctcagaaacttctttgtgatgtttgcattcaagtcacagagttgaacattccctttcatagagcaggtttgaaacactctttttgtagtatgtggatgtggacatttggatcgctttcaggcctatggtgaaaaaggaaatatcttcccatgaaaactagacagaagcattctcagaagtttatttgtgatgtgtgccctcaactaacagagttgaacctttcttttgatagagcagttttgaaacactctttttgtaaaatctgcaagaggatatttggatagctttgaggatttcgttgcaaacgggaatggcttcatataaactctagacagaagcattctcagaaacttcgttgggatgttttgattgaagtcccagtgttgaacattcccttttatagagcaggttggaaacactctttctgcattccctggaagtggacatttggagcgctttcaggacgacggtgaaaatggaaatatcttccaataaaatctagatagaagcaacgtcagaaacttttctgtgatggatctactcagctaacagagttgaacctttcttttgagagagcagttttgcaacactctttttgtggaatatgcaagtggatattagggcagctttgaggatttcgttggaaacgggaatacatgtaaaaagcagacagcagcattctcagaaacttctttgtgatgtttgcattgaagtcacagagttgaacattccctttgagagagcaggtttgaaacacgccttttgtcatatctggaagtgtccattcggagcgcattcaggcttgtgttgaaaaaggaaatatcctcccataaaaactagacagaagcattctcagaaacttatctgtgatgtatgtactcaactaacagaactaaaccatcgttttgaaggagcagttttgaaacactctttttgcggaatctgcaagtggatatttggctagctgggaggatttcgttggaaacgggattacatacaaaaagcagacagcagcattctcagaaactactttgtgacgtttgcattcaagtcacagagttgaacattccctttcatagagcaggtttgaaacactctttttgtagtatctggatgtggacatttggatcgctttcaggcctatggtgaaaaaggaaatatcttcccatgaaaactagacagaagcattctcagaaacttatttgtgatgtgtgccctcaactgacagtgttgaacctttgttttgatagagcagttctgaaacacactttttgtaaaatctgcaagaggatatttggatagctctgaggatttcgttggaaacgggagtgtcttcaagtaaactctagacagaagcattctcagaaactgctttgggatgtttcaattgaagtcccagtgttgaacattcccattcatagagcaggtttgaaacactctttttgtactatctggaagtggacatttggagcgctttcaggtctacggtgaaaaaggagatatcttccaataaaaactagatagaagcaatgtcagaacttttttcatgatgtatctactcagcaaacagagttgaacctttcttttgagagagcagttttgacacagtctttgtggaatatgcaagtgggtattaggccagcttggaggatttcgttggaaacgggaatacgtataaaaagcagacagcagcattgtcagaaactactttgtgatgtttgcattcaagtcacagaattgaacactccctttcacagagcaggtttgaaacactctttttgtagtgtctgtaagtgaacatatggattgctttcaggcctaaggtgaaaaaggaaatatcttcccataaaaactagacagaagcattctcagaaacttgtttgtgatgtgtgccctctactgacagagttgaacctttctttgcaaagagcagctttgaaacactctttttgtagaatctgcaagaggatatgtggatagctttgaggatttcgttggaaacgggtatgtcttcagataaactctagacagaagcattctcagaaacttctttgggatgttgcattcaagtcacagagtagaacattcccattcatagagcagatttgaaacactctttttgtagtatctggaagtggacatttggagcgctttcaggcctatgttgaaaaaggaaatatcttcccataaaaactagacggaagcattctcagaaacttatttgtgatgtgtttgctcaactaacaggattgaaccatcgttttgaaggagcagttttgaaacactgttttcgtggaatctgcaagtggttatttggctagctttgaggatttcgttggcaaacgggattacatatacaaaggagacagcagcattctcagaaacttctttgtgatgtctgcattcaattcacagagttgagcattccctttcatagagcaggttggaaacactctttttgtagtatctggatgaggacatttggagcgctttcaggcgtatggtgaaaaaggaaatatcttcccgtaaaaactagacagaagcattctcagaaatttatttgtgatgtgtgccctcaactaacagagttgaacctttcttttgatagagcagttctgaaacactctttttgtaaaatctgcaagaggatatttggatagctttgaggatttcgttgcaaacgggaatggcttcatataaactctagacagaagcattctcagaaacttcgttgggatgtttcgattgaagtcccagtgttgaacattcccttttatagagcaggttggaaacactctttctgcattccctggaagtggacatttggagcgctttcaggacgacggtgaaaatggaaatatcttccaagaaaatctagatagaagcaacgtcagaaacttttatgtgatggatctactcagctaacagagttgaacctttcttttgagagagcagttttgcaacactctttttgtggaatatgcaagtggatattagggcagctttgaggatttcgttggaaacgggaatacatgtaaaaagcagacagcagcattctcagaaacttctttgtgatgtttgcattgaagtcacagagttgaacattccctttgagagagcaggtttgaaacacgccttttgtcatatctggaagtgtccattcggagcgcattcaggcttgtgttgaaaaaggaaatatcctcccataaaaactagacagaagcattctcagaaacttatctgtgatgtatgtactcaactaacagaactaaaccatcgttttgaaggagcagttttgaaacactctttttgcagaatctgcaagtggatatttggctagctgggaggatttcgttggaaacgggattacatacaaaaagcagagagcagcattctcagaaacttctttgtgatgtttgcattcaagtcacagagttgaacattccctttcatagagcaggtttgaaacactctttttgtagtatctggatgtggacatttggatcgctttcaggcctatggtgaaaaaggaaatatcttcccatgaaaactagacagaagcattctcagaaacttatttgtgatgtgtgccctcaactgacagtgttgaacctttgttttgatagagcagttctgaaacacactttttgtaaaatctgcaagaggatatttggatagctttgaggatttcgttggaaacgggaatgtcttcatgtaaactctagacagaagcattctcagaaactgctttgggatgtttcaattgaagtcccagtgttgaacattcccattcatagagcaggtttgaaacactctttttgtactatctggaagtggacatttggagcgctttcaggtctacggtgaaaaaggagatatcttccaataaaaactagatagaagcaatgtcagaacttttttcatgatgtatctactcagcaaacagagttgaacctttcttttgagagagcagttttgaaacagtctttgtggaatatgcaagtgggtattaggccagcttggaggatttcgttggaaacgggaatacgtataaaaagcagacagcagcattgtcagaaactactttgtgatgtttgcattcaagtcacagaattgaacactccctttcacagagcaggtttgaaacactctttttgtagtgtctgtaagtgaacatttggattgctttcaggcctaatgtgaaaaaggaaatatcttcccataaaaactagacagaagcattctcagaaacttgtttgtgatgtgtgccctctactgacagagttgaacctttctttgcaaagagcagttttgaaacactctttttgtagaatctgcaagaggatatttggatagctttgaggatttcttgggaaacgggaatgtcttcagataaactctagacagaagcattctcagaaacttctttgggatgtttcaattgaagtcacagtgttgaacattccctttcacagagcaggtttgaaacactctttttgtagtgtctataagtgaacatttggcgtgctttcaggcctaacgtgaaaaaggaaatatcttcccataaaaactagacagaagcattctcagaaacttgttcgtgatgtgtgccctctactgacagagttgaacctttctttgcaaagagcagctttgaaacactctttttgtagaatctgcaagaggatatgtggatagctttgaggatttcgttggaaacgggtatgtcttcagataaactctagacagaagcattctcagaaacttctttgggatgtttcaattgaagtcacagtgttgaacattccctttcacagagcaggtttgaaacactctttttgtagtgtctataagtgaacatttggcgtgctttcaggcctaacgtgaaaaaggaaatatcttcccataaaaactagacagaagcattctcagaaacttgttcatgatgtgtgccctctactgacagagttgaacctttctttgcaaagagcagctttgaaacactctttttgtagaatctgcaagaggatatttggatagcttggaggatttcgttggaaacgggtatgtcttcagataaactctagacagaagcattctcagaaacttctttgggatgttgcattcaagtcacagagtagaacattcccattcatagagcagatttgaaacactctttttgtagtatctggaagtggacatttggagcgctttcaggcctatgttgaaaaaggaaatatcttcccataaaaactagacggaagcattctcagaaacttatttgtgatgtgtttgctcaactaacaggattgaaccatcgttttgaaggagcagttttgaaacactgttttcgtggaatctgcaagtggatatttggctagctttgaggatttcgttggaaacgggattacatataaaaaggagacagcagcattctcagaaacttctttgtgatgtctgcattcaattcacagagttgagcattccctttcatagagcaggtttgaaacactctttttgtagtatctggatgtggacatttggatcgctttcaggcctatggtgaaaaaggaaatatcttcccatgaaaactagacagaagcattctcagaaatttatttgtgatgtgtgccctcaactaacagagttgaacctttcttttgatagagcagttttgaaacactctttttgtaaaatctgcaagaggatatttggatagctttgaggatttcgttgcaaacgggaatggcttcatataaactctagacagaagcattctcagaaacttcgttgggatgtttcgattgaagtcccagtgttgaacattcccttttatagagcaggttggaaacactctttctgcattccctggaagtggacaattggagcgctttcaggacgacggtgaaaatggaaatatcttccaataaaatctggatagaagcaatgtcagaaactattctgtgatggatctactcagctaacagagttgaacctttcttttgagagagcagttttgcaacactctttttgtggaatatgcaagtggatattagggcagctttgaggatttcgttggaaacgggaatacatgtaaaaagcagacagcagcattctcagaaacttctttgtgatgtttgcattgaagtcacagagttgaacattccctttgagagagcaggtttgaaacacgccttttgtcatatctggaagtgtccattcggagcgcattcaggcttgtgttgaaaaaggaaatatcctcccataaaaactagacagaagcattctcagaaacttatctgtgatgtatgtactcaactaacagaactaaaccatcgttttgaaggagcagttttgaaacactctttgtgcggaatctgcaagtggatatttggctagctgggaggatttcgttggaaacgggattacatacaaaaagcagacagcagcattctcagaaacttctttgtgatgtttgcattcaagtcacagagttgaacattccctttcatagagcaggtttgaaacactctttttgtagtatctggatgtggacatttggatcgctttcaggcctatggtgaaaaaggaaatatcttcccatgaaaactagacagaagcattctcagaaacttatttgtgatgtgtgcactcaactgacagtgttgaacctttgttttgatagagcagttctgaaacacactttttgtaaaatctgcaagaggatatttggatagctttgacgatttcgttggaaacgggaatgtcttcatgtaaactctagacagaagcattctcagaaactgctttgggatgtttcaattgaagtcccagtgttgaacattcccattcatagagcaggtttgaaacactctttttctactatgctggaagtggacatttggagcgctttcaggtctacggtgaaaaaggagatatcttccaataaaaactagatagataagcaatgtcagaacttttttcatgatgtatctactcagcaaacagagttgaacctttcttttgagagagcagttttgaaacactctttttgtggaatatgcaagtgggtattaggccagcttggaggatttcgttggaaacgggaatacgtataaaaagcagacagcagcattgtcagaaactactttgtgatgtttgcattcaagtcacagaattgaacactccctttcacagagcaggtttgaaacactctttttgtagtgtctgtaagtgaacatttggattgctttcaggcctaaggtgaaaaaggaaatatcttcccataaaaactagacagaagcattctcagaaacttgtttgtgatgtgtgccctctactgacagagttgaacctttctttgcaaagagcagttttgaaacactctttttgtagaatctgcaagaggatatttggatagctttgaggatttcttgggaaacgggaatgtcttcagataaactctagacagaagcattctcagaaacttctttgggatgtttcaattgaagtcacagtgttgaacattccctttcacagagcaggtttgaaacactctttttgtagtgtctataagtgagcatttggcgtgctttcagttgtaacgtgaaaaaggaaatatcttcccataaaaactagacagaagcattctcagaaacttgttcgtgatgtgtgccctctactgacagagttgaacctttctttgcaaagagcagctttgaaacactctttttgtagaatctgcaagaggatatttggatagctttgaggatttcgttggaaacgtgtatgtcttcagataaactctagacagaagcattctcagaaacttctttgggatgttgcattcaagtcacagagtagaacattccgattcatagagcagatttgaaaccctctttttgaagtatctggaagtggacatttggagcgctttcaggcctatgttgaaaaaggaaatatcttcccataaaaactagacggaagcattctcagaaacttacatgtgatgtgtttgctcaactaacagaattgaaccatcgttttgaaggagcagttttgaaacactgttttcgtggaatctgcaagtggatatttggctagctttgaggatttcgttggaaacgggattacatagaaaaaggagacagcagcattctcagaaacttctttgtgatgtctgcattcaattcacagtagttgagcattccctttcatagagcaggttggaaacactctttttgtagtatctggatgaggacatttggagcgctttctggcctatggtgaaaaaggaaatatcttcccgtaaaaactagacagaagcattctcagaagtttatttgtgatgtgtgccctcaactaacagagttgaacctttcttttgatagagcagttttgaaacactctttttgtaaaatctgcaagaggatatttggatagctttgaggatttcgttgcaaacgggaatggcttcatataaactctagacagaagcattctcagaaacttcgttgggatgtttcgattgaagtcccagtgttgaacattcccttttatagagcaggttggaaacactctttctgcattccctggaagtggacatttggagcgctttcaggacgacggtgaaaatggaaatatcttccaagaaaatctagatagaagcaacgtcagaaacttttctgtgatggatctactcagctaacagagttgaacctttcttttgagagagcagttttgcaacactctttttgtggaatatgcaagtggatattagggcagctttgaggatttcgttggaaacgggaatacatgtaaaaagcagacagcagcattctcagaaacttctttgtgatgtttgcattgaagtcacagcagttgaacattccctttgagagagcaggtttgaaacacgccttttgtcatatctggaagtgtccattcggagcgcattcaggcttgtgttgaaaaaggaaatatcctcccataaaaactagacagaagcattctcagaaacttatctgtgatgtatgtactcaactaacagaactaaaccatcgttttgaaggagcagttttgaaacactctttttgcggaatctgcaagtggatatttggctagctgggaggatttcgttggaaacgggattacatacaaaaagcagacagcagcattctcagaaacttctttgtgatgtttgcattcaagtcgcagagttgaacattccctttcatagagcaggtttgaaacactctttttgtagtatctggatgtggacatttggatcgctttcaggcctatggtgaaaaaggaaatatcttcccatgaaaactagacagaagcattctcagaaacttatttgtgatgtgtgccctcaactgacagtgttgaacctttgttttgatagagcagttctgaaacacactttttttaaaatctgcaagaggatatttggatagctttgaggatttcgttggaaacgggaatgtcttcatgtaaactctagacagaagcattctcagaaactgctttgggatgtttcaattgaagtcccagtgttgaacattcccattcatagagcaggtttgaaaccctctttttgtactatctggaagtggacatttggagcgctttcaggtctacggtgaaaaaggagatatcttccaataaaaactagatagaagcaatgtcagaacttttttcatgatgtatctactcagctaacagagttgaacctttcttttgagagagcagttttgaaacactctttttgtggaatatgcaagtgggtattaggccagcttggaggatttcgttggaaacgggaatacgtataaaaagcagacagcagcattgtcagaaactactttgtgatgtttgcattcaagtcacagaattgaacactccctttcacagagcaggtttgaaacactctttttgtagtgtctgtaagtgaacatttggattgctttcaggcctaaggtgaaaaaggaaatatcttcccataaaaactagacagaagcattctcagaaacttgtttgtgatgtgtgccctctactgacagagttgaaactttctttgcaaagagcagttttgaaacactctttttgtagaatctgcaagaggatatttggatagctttgaggatttcttgggaaacgggaatgtcttcagataaactctagacagaagcattctcagaaacttctttgggatgtttcaattgaagtcacagtgttgaacattccctttcacagagcaggtttgaaacactctttttgtagtgtctataagtgaacatttggcgtgctttcaggcgtaacgtgaaaaaggaaatatcttcccataaaaactagacagaagcattctcagaaacttgttcgtgatgtgtgccctctactgacagagttgaacctttctttgcaaagagcagctttgaaacacactttttgtagaatctgcaagaggatatttggatagctttgaggatttcgttggaaacggatatgtcttcagataaactctagacagaagcattctcagaaacttctttgggatgttgcattcaagtcacagagtagaacattcccattcatagagcagatttgaaacactctttttgtagtatctggaagtggacatttggagcgctttcaggcctatgttgaaaaaggaaatatcttcccataaaaactagacggaagcattctcagaaacttatttgtgatgtgtttgctcaactaacaggattgaaccatcgttttgaaggagcagttttgaaacactgttttcgtggaatctgcaagtggatatttggctagctttgaggatttcgttggaaacgggattacatatacaaaggagacagcaagcattctcagaaacttctttgtgatgtctgcattcaattcacagagttgagcattccctttcatagagcagattggaaacactctttttgtagtatctggatgaggacatttggagcgctttcaggcctatggtgaaaaaggaaatatcttcccgtaaaaactagacagaagcattctcagaagtttatttctgatgtgtgccctcaactaacagagttgaacctttcttttgatagagcagttttgaaacactctttttgtaaaatctgcaagaggatatttggatagctttgaggatttcgttgcaaacgggaatggcttcatataaactctagacagaagcattctcagaaacttcgttgggatgtttcgattgaagtcccagtgttgaacattcccttttatagagcaggttggaaacactctttctgcattccctggaagtggacatttggagcgctttcaggacgacggtgaaaatggaaatatcttccaagaaaatctagatagaagcaatgtcagaaacttttatgtgatggatctactcagctaacagagttgaacctttcttttgagagagcagttttgcaacactctttttgtggaatatgcaagtggatattagggcagctttgaggatttcgttggaaacgggaatacatgtaaaaagcagacagcagcattctcagaaacttctttgtgatgttttcgttgaagtcacagggttgaacattccctttgagagagcaggtttgaaacacgccttttgtcatatctggaagtgtccattcggaacgcattcaggcttgtgttgaaaaaggaaatatcctcccataaaaactagacagaagcattctcagaaacttatttgtgatgtatgtactcaactaacagaactaaaccatcgttttgaaggagcagttttgaaacaccctttttgcggaatctgcaactggatatttggctagcttggaggatttcgttggaaacgggattacatacaaaaagcagacagcagcattctcagaaacttctttgtgatgtttgcattcaagtcgcagagttgaacattccctttcatagagcaggtttgcaacactctttttgtagtatctggatgtggacatttggatcgctttcaggcctatgttgaaaaaggaaatatcttcccatgaaaactagacagaagcattctcagaaacttatttgtgatgtgtgccctcaactgacagtgttgaacctttgttttgatagagcagttctgaaacacacttgttgtaaaatctgcaagaggatatttggatagctttgaggatttcgttggaaacgggaatgtcttcatgtaaactctagacagaagcattctcagaaactgctttgggatgtttcaattgaagtcccagtgttgaacattcccattcatagagcaggtttgaaacactctttttgtactatctggaagtggacatttggagcgctttcaggtctacggtgaaaaaggagatatcttccaataaaaactagatagaagcaatgtcagaacttttttcatgatgtatctactcagcaaacagagttgaacctttcttttgagagagcagttttgaaacactctttttgtggaatatgcaagtgggtattaggccagcttggaggatttctttggaaacgggaatacgtataaaaagcagacagcagcattgtcagaaactactttgtgatgtttgcattcaagtcacagaattgaacactccctttcacagagcaggtttgaaacactctttttgtagtgtctgtaagtgaacatttggattgctttcaggcctaaggtgaaaaaggaaatatcttcccataaaaactagacagaagcattctcagaaacttgtttgtgatgtgtgccctctactgacagagttgaacctttctttgcaaagaccagttttgaaacactctttttgtagaatctgcaagaggatatttggatagctttgaggatttcttgggaaacgggaatgtcttcagataaactctagacagaagcattctgagaaacttctttgggatatttcaattgaagtcacagtgttgaacattccctttcacagagcaggtttgaaacactctttttgtagtgtctataagtgaacatttggcgtgctttcaggcgtaacgtgaaaaaggaaatatcttcccataaaaacgagacagaagcattctcagaaacttgttcttgatgtgtcccctctactgacagagttgaacctttctttgcaaagagcagctttgaaacactctttttgtagaatctgcaagaggatatttggatagcttggaggatttcgttggaaacgggtatgtcttcagataaactctagacagaagcattctcagaaacttctttgggatgttgcattcaagtcacagagtagaacattcccattcatagagcagatttgaaacactctttttgtagtatctggaagtggacatttggagcgctttcaggcctatgttgaaaaaggaaatatcttcccataaaaactagacggaagcattctcagaaacttatttgtgatgtgtttgctcaactaacaggattgaaccatcgttttgaaggagcagttttgaaacactgttttcgtggaatctgcaagtggatatttggctagctttgaggatttcgttggaaacgggattacatatacaaaggagacagcagcattctcagaaacttctttgtgatgtctgcattcaattcacagagttgagcattccctttcatagagcaggttggaaacactctttttgtagtatctggatgaggacatttggagcgctttcaggcatatggtgaaaaaggaaatatcttcccgtaaaaactagacagaagcattctcagaagtttatttgtgatgtgtgccctcaactaacagagttgaacctttcttttgatagagcagttttgaaacactctttttgtaaaatctgcaagaggatatttggatagctttgaggatttcgttgcaaacgggaatggcttcatataaactctagacagaagcattctcagaaacttcgttgggatgtttcgattgaagtcccagtgttgaacattcccttttatagagcaggttggaaacactctttctgcattccctggaagtggacatttggagcgctttcaggacgacggtgaaaatggaaatatcttccaataaaatctagatagaagcaatgtcagaaacttttatgtgatggatctactcagctaacagagttgaacctttcttttgagagagcagttttgcaacactctttttgtggaatatgcaagtggatattagggcagctttgaggatttcgttggaaacgggaatacatgtaaaaagcagacagcagcattctcagaaacttctttgtgatgtttgcattgaagtcacagagttgaacattccctttgagagagcaggtttgaaacacgccttttgtcatatctggaagtgtccattcggagcgcattcaggcttgtgttggaaaaggaaatatcctcccataaaaactagacagaagcattctcagaaacttatttgtgatgtatgtactcaactaacagaactaaaccatcgttttgaaggagcagttttgaaacactctttttgcggaatctgcaagtggatatttgggtagcttggaggatttcgttagaaacgggattacatacaaaaagcagacagcagcattctcagaaacttctttgtgatgttagcattcaagtcacagagttgaacattccctttcatagagcaggtttgaaacactctttttgtagtatctggatgtggacatttggattgctttcaggcctatggtgaaaaaggatatatcttcccatgaaaactagacagaatcattctcagaaacttatttgtgatgtgtgccctcaactgacagtgttgaacctttgttttgatagagcagttctgaaacacactttttgtaaaatctgcaagaggatatttggagagctttgaggatttcattggaaacgggaatgtcttcatgtaaactctagacagaagcattctcagaaactgctttgggatgtttcaattgaagtcccagtgttgaacattccctttcatagagcaggtttgaaacactctttttgtagtatctggaaggggacatttggagcgctttcaggtctacggtgaaaaaggagatatcttccaataaaaactagatagaagcaatgtcagaacttttttcatgatgtatctactcagcaaacagagttgaacctttcttttgagagagcagttttgaaacactctttttgtggaatatgcaagtgggtattaggccagcttggaggatttcgttggaaacgggaatacgtataaaaagcagacagcagcattgtcagaaactactttgtgatgtttgcattcaagtcacagaattgaacactccctttcacagagcaggtttgaaacactctttttgtagtgtctgtaagtgaacatatggattgctttcaggcctaaggtgaaaaaggaaatatcttcccataaaaactaaactagacagaagcattctcagaaacttgtttgtgatgtgtgccctctactgacagagttgaacctttctttgcaaagagcagctttgaaacactctttttgtagaatctgcaagaggatatttggatagctttgaggatttcttgggaaacgggaatgtcttcagataaactctagacagaagcattctcagaaacttctttgggatgtttcaattgaagtcacagtgttgaacattccctttcacagagcaggtttgaaacactctttttgtagtgtctataagtgaacatttggcgtgctttcaggcctaacgtgaaaaaggaaatatcttcccataaaaactagacagaagcattctcagaaacttgttcctgatgtgtgccctctaactgacagagttgaacctttctttgcaaagagcagctttgaaacactctttttgtagaatctgcaagaggatatttggatagctttgaggatttcgttggaaacggggatgtcttcagataaactctagacagaagcattctcagaaacttctttgggatgttgcattcaagtcacagagtagaacattcccattcatagagcagatttgaaacactctttttgtagtatctggaagtggacatttggagcgctttcaggcctatgttgaaaaaggaaatatcttcccataaaaactagacggaagcattctcagaaacttatttgtgatgtgtttgctcaactaacaggattgaaccatcgttttgaaggagcagttttgaaacactgttttcgtggaatctgcaagtggatatttggctagctttgaggatttcgttggaaacggcattacatatacaaaggagacagcagcattctcagaaacttctttgtgatgtctgcattcaattcacagagttgagcattccctttcatagagcaggttggaaacactctttttgtagtatctggatgaggacatttggagcgctttcaggcctatggtgaaaaaggaaatatcttcccgtaaaaactagacagaagcattctcagaagtttatttgtgatgtgtgccctcaactaacagagttgaacctttcttttgatagagcagttttgaaacactctttttgtaaaatctgcaagaggatatttggatagctttgaggatttcgttgcaaacgggaatggcttcatataaactagacagaagcattctcagaaacttcgttgggatgtttcgattgaagtcccagtgttgaacattcccttttatagagcaggttggaaacactctttctgcattccctggaagtggacatttggagcgctttcaggacgacggtgaaaatggaaatatcttccaagaaaatctagatagaagcaacgtcagaaacttttctgtgatggatctactcagctaacagagttgaacctttcttttgagagagcagttttgcaacactctttttgtggaatatgcaagtggatattagggcagctttgaggatttcgttggaaacgggaatacatgtaaaaaggagacagcagcattctcagaaacttctttgtgatgtttgcattgaagtcacagagttgaacattccctttgagagagcaggtttgaaacacgccttttgtcatatctggaagtgtccattcggagcgcattcaggcttgtgttgaaaaaggaaatatcctcccataaaaactagacagaagcattctcagaaacttatctgtgatgtatgtactcaactaacagaactaaaccatcgttttgaaggagcagttttgaaacactctttttgcggaatctgcaagtggatatttggctagctgggaggatttcgttggaaacgggattacatacaaaaagcagacagcagcattttcagaaactactttgtgatgtttgcattcaagtcacagagttgaacattccctttcatagagcaggtttgaaacactctttttgtagtatctggatgtggacatttggatcgctttcaggcctatggtgaaaaaggaaatatcttcccatgaaaactagacagaagcattctcagaaatttatttgtgatgtgtgccctcaactaacagagttgaacctttcttttgatagagcagttttgaaacactctttttgtaaaatctgcaagaggatatttggatagctttgaggatttcgttgcaaacgggaatggcttcatataaactctagacagaagcattctcagaaacttcgttgggatgtttcgattgaagtcccagtgttgaacattcccattcatagagcaggtttgaaacactctttttgtagtgtctataagtgaacatttggcgtgctttcaggcctaacgtgaaaaaggaaatatcttcccataaaaactagacagaagcattctcagaaacttgttcgtgatgtgtgccctctactgacagagttgaacctttctttgcaaagagcagctttgaaacacactttttgtagaatctgcaagaggatatttggatagctttgaggatttcgttggaaacgggtatgtcttcagataaactctagacagaagcattctcagaaatttctttgggatgttgcatgcaagtcacagagtagaacattcccattcatagagcagatttgaaacactctttttgtactatctggaagtggacatttggagcgctttcaggcctatgttgaaaaaggaaatatcttcccataaaaactagacggaagcattctcagaaacttaattgtgatgagtttgctcaactaacaggattgaaccatccttttgaaggagcagttttgaaacactgttttcgtggaatctgcaagtggatatttggctagctttgaggatttcgttggaaacgggattacatataaaaaggagacagcagcattctcagaaacttctttgtgatgtctgcatttaattcacagagttgagcattccctttcatagagcaggttggaaacactctttttgtagtatctggatgaggacatttggagcgctttcaggcgtatggtgaaaagggaaatatcttcccgtaaaaactagacagaagcattctcagaagtttatttgtgatgtgtgccctcaactaacagagttgaacctttcttttgatagagcagttttgaaacactctttttgtaaaatctgcaagaggatatttggatagctttgaggatttcgttgcaaacgggaatggcttcatataaactctagacagaaagcattctcagaaacttcgtcgggatgtttcgattgaagtcccagtgttgaacattcccttttatagagcaggttggaaacactctttctgcattccctggaagtggacaattggagcgctttcaggacgacggtgaaaatggaaatatcttccaataaaatctggatagagcaaccgtcagaaacttttctgtgatggatctactcagctaacagagttgaacctttcttttgagagagcagttttgcaacactctttttgtggaatatgcaagtggatattagggcagctttgaggatttcgttggaaacgggaatacatgtaaaaagcagacagcagcattctcagaaacttctttgtgatgtttgcattgaagtcacagagttgaacattccctttgagagagcaggtttgaaacacgccttttgtcatatctggaagtgtccattcggagcgcattcaggcttgtgttgaaaaaggaaatatcctcccataaaaactagacagaagcattctcagaaacttatctgtgatgtatgtactcaactaacagaactaaaccatcgttttgaaggagcagttttgaaacactctttttgcggaatctgcaagtggatatttggctagctgggaggatttcgttggaaacgggattacatacaaaaagcagacagcagcattctcagaaacttctttgtgatgtttgcattcaagtcacagagttgaacattccctttcatagagcaggtttgaaacactctttttgtagtatctggatgtggacatttggatcgctttcaggcctatggtgaaaaaggaaatatcttcccatgaaaactagacagaagcattctcagaaacttatttgtgatgtgtgccctcaactgacagtgttgaacctttgttttgatagagcagttctgaaacacactttttgtaaaatctgcaagaggatatttggatagctttgaggatttcgttggaaacgggaatgtcttcatgtaaactctagacagaagcattctcagaaactgctttgggatgtttcaattgaagtcccagtgttgaacattccctttcatagagcaggtttgaaacactctttttgtactatctggaagtggacattcggagcgctttcaggtctacggtgaaaaaggagatatcttccaataacaactagatagaagcaatgtcagaacttttttcatgatgtatctactcagctaacagagttgaacctttcttttgagagagcagttttgaaacactctttttgtggaatatgcaagtgggtattaggccagcttggaggatttcgttggaaacgggaatacgtataaaaagcagacagcagcattgtcagaaactactttgtgatgtttgcattcaagtcacagaattgaacactccctttcacagagcaggtttgaaacactctttttgtagtgtctataagtgaacatttggcgtgctttcaggcctaaggtgaaaaaggaaatatcttcccataaaaactagacagaagcattctcagaaacttgtttgtgatgtgtgccctctactgacagagttgaacctttctttgcaaagagcagttttgaaacactctttttgtagaatctgcaagaggatatttggatagctttgaggatttcttgggaaacgggaatgtcttcagataaactctagacagaagcattctcagaaacttctttgggatgtttcaattgaagtcacagtgttgaacattccctttcagagagcaggtttgaaacactctttttgtagtgtctataagtgaacatttggcgtgctttcaggcctaacgtgaaaaaggaaatatcttcccataaaaactagacagaagcattctcagaaacttgttcttgatgtgtcccttctattgacagagttgaacctttctttgcaaagagcagctttgaaacactctttttgtagaatctgcaagaggatatttggatagctttgaggatttcgttggaaacgggtatgtcttcagataaactctagacagaagcattctcagaaacttctttgggatgttgcattcaagtcacagagtagaacattcccattcatagagcagatttgaaacactctttttgtagtatctggaagtggacatttggagcgctttcaggcctatgttgaaaaaggaaatatcttcccataaaaactagacggaagcattctcagaaacttacttgtgatgtgtttgctcaactaacagaattgaaccatcgttttaaaggagcagttttgaaacactgttttcgtggaatctgcaagtggatatttggctagctttgaggatttcgttggaaacgggattacatataaaaaggagacagcagcattctcagaaacttctttgtgatgtctgcattcaagtcacagagttgagcattccctttcatagagcaggttggaaacactctttttgtagtatctggatgaggacatttggagcactttcaggcgtatggtgaaaaaggaaatatcttcccgtaaaaactagacagaagcattctcagaagtttatttgtgatgtgtgccctcaactaacagagttgaaactttcttttgatagagcagttttgaaacactcattttgtaaaatctgcaagaggatatttggatagctttgaggatttcgttgcaaacgggaatggcttcatataaactctagacagaagcattctcagaaacttcgttgggatgtttcgattgaagtcccagtgttgaacattcccttttatagagcaggttggaaacactctttctgcattccctggaagtggacatttggagcgctttcaggacgacggtgaaaatggaaatatcttccaagaaaatctagatagaagcaacgtcagaaacttttatgtgatggatctactcagctaacagagttgaacctttcttttgagagagcagttttgcaacactctttttgtggaatatgaaagtggatattagggcagctttgaggatttcgttggaaacgggaatacatgtaaaaagcagacagcagcattctcagaaacttctttgtgatgtttgcattgaagtcacagagttgaacattctctttgagagagcaggtttgaaacacgccttttgtcatatctggaagtgtccattcggagcgcattcaggcttgtgttgaaaaaggaaatatcctcccagaaaaactagacagaagcattctcagaaacttatctgtgatgtatgtactcaactaacagaactaaaccatcgttttgaaggagcagttttgaaacactctttttgcggaatctgcaagtggatatttggctagctgggaggatttcgttggaaacgggattacatacaaaaagcagacagcagcattctcagaaacttctttgtgatgtttgcattcaagtcacagagttgaacattccctttcatagagcaggtttgaaacactctttttgtagtatctggatgtggacatttggatcgctttcaggcctatggtgaaaaaggaaatatcttcccatgaaaactagacagaagcattctcagaaacttatttgtgatgtgtgccctcaactgacagtgttgaacctttgttttgatagagcagttctgaaacacactttttgtaaaatctgcaagaggatatttggatagctttgaggatttcgttggaaacgggaatgtcttcatgtaaactctagacagaagcattctcagaaactgctttgggatgtttaaattgaagtcccagtgttgaacattccctttcatagagcaggtttgaaacactctttttgtactatctggaagtggacatttggagcgctttcaggtctacggtgaaaaaggagatatcttccaataaaaactagatagaagcaatgtcagaacttttttcgtgatgtatctactcagcaaacagagttgaacatttcttttgagagagcagttttgaaacactctttttgtggaatatgcaagtgggtattaggccagcttggaggatttcgttggaaacgggaatacgtataaaaagcagacagcagcattgtcagaaactactttgtgatgtttgcattcaagtcacagaattgaacactccctttcacagagcaggtttgaaacactctttttgtagtgtctgtaagtgaacatatggattgctttcaggcctaaggtgaaaaaggaaatatcttcccataaaaactagacagaagcattctcagaaacttgtttgtgatgtgtgccctctactgacagagttgaacctttctttgcaaagagcagttttgaaacactctttttgtagaatctgcaagaggatatttggatagctttgaagatttcttgggaaacgggaatgtcttcagataaactctagacaggaagcattctcagaaacttctttgggatgtttcaattgaagtcacagtgttgaacattccctttcacagagcaggtttgaaacactctttttgtagtgtctataagtgaacatttggcgtgctttcaggcctaacgtgaaaaaggaaatatcttcccataaaaactagacagaagcattctcagaaacttgttcgtgatgtgtgccctctactgacagagttgaacctttctttgcaaagagcagctttgaaacactctttttgtagaatctgcaagaggatatttggatagcttggaggatttcgttggaaacgggtatgtcttcagataaactctagacagaagcattctcagaaacttctttgggatgttgcattcaagtcacagagtagaacattcccattcatagagcagatttgaaacactctttttgtagtatctggaagtggacatttggagcgctttcaggcctatgttgaaaaaggaaatatcttcccataaaaactagacggaagcattctcagaaacttatttgtgatgtgtttgctcaactaacaggattgaaccatcgttttgaaggagcagttttgaaacactgttttcgtggaatctgcaagtggatatttggctagctttgaggatttcgttggaaacgggattatatatacaaaggagacagcagcattctcagaaactgctttgggatgtttcaattgaagtcccagtgttgaacattccctttcatagagcaggtttgaaacactctttttgtagtatctggatgaggacatttggagcgctttcaggcgtatggtgaaaaaggaaatatcttcccttaaaaacaagacagaagcattctcagaagtttatttctgatgtgtgccctcaactaacagagttgaacctttcttttgatagagcagttttgaaacactctttttgtaaaatctgcaagaggatatttggatagctttgaggatttcgttgcaaacgggaatggcttcatataaactctagacagaagcattctcagaaacttcgttgggatgtttcgattgaagtcccagtgttgaacattcccttttatagagcaggttggaaacactctttctgcattccctggaagtggacatttggagcgctttcaggacgacggtgaaaatggaaatatcttccaagaaaatctagatagaagcaatgtcagaaacttttatgtgatggatctactcagctaacagagttgaacctttcttttgagagagcagttttgcaacactctttttgtggaatatgcaagtggatattagggcagctttgaggatttcgttggaaacgggaatacatgtaaaaagcagacagcagcattctcagaaacttctttgtgatgtttgcattgaagtcacagagttgaacattccctttgagagagcaggtttgaaacacgccttttgtcatatctggaagtgtccattcggagcgcattcaggcttgtgttgaaaaaggaaatatcctcccagaaaaactagacagaagcattctcagaaacttatctgtgatgtatgtactcaactaacagaactaaaccatcgttttgaaggagcagttttgaaacactctttttgcggaatctgcaagtggatatttggctagctgggaggatttcgttggaaacgggattacatacaaaaagcagacagcagcattctcagaaacttctttgtgatgtttgcattcaagtcacagagttgaacattccctttcatagagcaggtttgaaacactctttttgtagtatctggatgtggacatttggatcgctttcaggcctatggtgaaaaaggaaatatcttcccatgaaaactagacagaagcattctcagaaacttatttgtgatgtgtgccctcaactgacagtgttgaacctttgttttgatagagcagttctgaaacacactttttgtaaaatctgcaagaggatatttggatagctttgaggatttcgttggaaacgggaatgtcttcatgtaaactctagacagaagcattctcagaaactgctttgggatgtttcaattgaagtcccagtgttgaacattccctttcatagagcaggtttgaaacactctttttgtactatctggaagtggacatttggagcgctttcaggtctacggtgaaaaaggagatatcttccaataaaaactagatagaagcaatgtcagaacttttttcatgatgtatctactcagcaaacagagttgaacctttcttttgagagagcagttttgaaacactctttttgtgcaatatgcaagtgggtattaggccagcttggaggatttcgttggaaacgggaatacgtataaaaagcagacagcagcattgtcagaaactactttgtgatgtttgcattcaagtcacagaattgaacactccctttcacagagcaggtttgaaacactctttttgtagtgtctgtaagtgaacatttggattgctttcaggcctaaggtgaaaaaggaaatatcttccaataaaaactagacagaagcactctcagaaacttgtttgtgatgtgtgccctctactgacagagttgaacctttctttgcaaagagcagttttgaaacactccttttgtagaatctgcaagaggatatttggatagctttgaggatttcttgggaaacgggaatgtcttcagataaactctagacagaagcattctcagaaacttctttgggatgtttcaattgaagtcacagtgttgaacattccctttcacagagcaggtttgaaacactctttttgtagtgtctataagtgaacatttggcgtgctttcaggcctaacgtgaaaaaggaaatatcttcccataaaaactagacagaagcattctcagaaacttgttcgtgatgtgtgccctctactgacagagttgaacctttctttgcaaagagcagctttgaaacactctttttgtagaatctgcaagaggatatttggatagcttggaggatttcgttggaaacgggtatgtcttcagataaactgctagacagaagcattctcagaaacttctttgggatgttgcattcaagtcacagagtagaacattcccattcatagagcagatttgaaacactctttttgtagtatctggaagtggacatttggagcgctttcaggcctatgttgaaaaaggaaatatcttcccataaaaactagacggaagcattctctgaaacttatttgtgatgtgtttgctcaactaacaggattgaaccatcgttttgaaggagcagttttgaaacactgttttcgtggaatctgcaagtggatatttggctagctttgaggatttcgttggaaacgggattacatataaaaaggagacagcagcattctcagaaacttctttgtgatgtttgcattcaagtcacagagttgaacattccctttcatagagcaggtttgaaacactctttttgtagtatctggatgtggacatttggatcgctttcaggcctatggtgaaaaaggaaatatcttcccatgaaaactagacagaagcattctcagaaacttatttgtgatgtgtgccctcaactgacagtgctgaacctttgttttgatagagcagttctgaaacacactttttgtaaaatctgcaagaggatatttggatagctttgaggatttcgttggaaacgggaatgtcttcatgtaaactctagacagaagcattctcagaaactgctttgggatgtttcaattgaagtcccagtgttgaacattccctttcatagagcaggtttgaaacactctttttgtactatctggaagtggacatttggagcgctttcaggtctacggtgaaaaaggagatatcttccaataaaaactagatagaagcaatgtaagaacttttttcaggatgtatctactcagcaaacagagttgaacctttcttttgagagagcagttttgaaacactctttttgtggaatatgcaagtgggtattaggccagcttggaggatttcgttggaaacgggaatacgtataaaaagcagacagcagcattgtcagaaactactttgtgatgtttgcattcaagtcacagaattgaacactccctttcacagagcaggtttgaaacactctttttgtagtgtctgtaagtgaacatttggattgctttcaggcctaaggtgaaaaaggaaatatcttcccataaaaactagacagaagcattctcagaaacttgtttgtgatgtgtgccctctactgacagagttgaacctttctttgcaaagagcagttttgaaacactctttttgtagaatctgcaagaggatatttggatagctttgaggatttcttgggaaacgggaatgtcttcagataaactctagacagaagcattctcagaaacttcttgggatatttcaattgaagtcacagtgttgaacattccctttcacagagcaggtttgaaacactctttttgtagtgtctataagtgaacatttggcgtgctttcaggcctaacgtgaaaaaggaaatatcttcccataaaaactagacagaagcattctcagaaacttgttcgtgatgtgtgccctctactgacagagttgaacctttctttgcaaagagcagctttgaaacactctttttgtagaatctgccagaggatatttggatagctttgaggatttcgttggaaacgggtatgtcttcagataaactctagacagaagcattctcagaaacttctttgggatgttgcatgcaagtcacagagtagaacattcccattcatagagcagatttgaaacactctttttgtagtatctggaagtggacatttggagcgctttcaggcctatgttgaaaaaggaaatatcttcccataaaaactagacggaagcattctcagaaacttaattgtgatgtgtttgctcaactaacaggattgaaccatcgttttgaaggagcagttttgaaacactgttttcgtggaatctgcaagtggatatttggctagctttgaggatttcgttggaaacgggattacatataaaaaggagacagcagcattctcagaaacttctttgtgatgtctgcattcaattcacagagttgagcattccctttcatagagcaggttggaaacactctttttgtagtatctggatgtggacatttggatcgctttcaggcctatggtgaaaaaggaaatatcttcccatgaaaactagacagaagcattctcagaaatttatttgtgatgtgtgcactcaactgacagtgttgaacctttgttttgatagagcagttctgaaacacactttttgtaaaatctgcaagaggatatttggatagctttgaggatttcgttggaaacgggaatgtcttcatgtaaactctacacagaagcattctcagaaactgctttgggatgtttcaattgaagtcccagcgttgaacattcccattcatagagcaggtttgaaacactctttttgtactatctggaagtggacatttggagcgctttcaggtctacggtgaaaaaggagatatcttccaataaaaactagatagaagcaatgtcagaacttttttcatgatgtatctactcagcaaacagagttgaacctttcttttgagagagcagttttgacacagtctttgtggaatatgcaagtgggtattaggccagcttggaggatttcgttggaaacgggaatacgtataaaaagcagacagcagcattgtcagaaactactttgtgatgtttgcattcaagtcacagaattgaacactccctttcacagagcaggtttgaaacactctttttgtagtgtctgtaagtgaacatttggattgctttcaggcctaaggtgaaaaaggaaatatcttcccataaaaactagacagaagcattctcagaaacttgtttgtgatgtgtgccctctactgacagagttgaaactttctttgcaaagagcagttttgaaacactctttttgtagaatctgcaagaggatatttggatagctttgaggatttcttgggaaacgggaatgtcttcagataaactctagacagaagcattctcagaaacttctttgggatgtttcaattgaagtcacagtgttgaacattccctttcacagagcaggtttgaaacactctttttgtagtgtctataagtgaacatttggcgtgctttcaggcgtaacgtgaaaaaggaaatatcttcccataaaaaccagacagaagcattctcagaaacttgttcgtgatgtgtgccctctactgacagagttgaacctttctttgcaaagagcagctttgaaacacactttttgtagaatctgcaagaggatatttggatagctttgaggatttcgttggaaacgggtatgtcttcagatatactctagacagaagcattctcagaaacttctttgggatgttgcattcaagtcacagagtagaacattcccattcatagagcagatttgaaacactctttttgtagtatctggaagtggacatttggagcgctttcaggcctatgttgaaaaaggaaatatcttcccataaaaactagacggaagcattctcagaaacttacttgtgatgtgtttgctcaactaacagaattgaaccatcgttttgaaggagcagttttgaaacactgttttcgtggaatctgcaagtggatatttggctagctttgaggatttcgttggaaacgggattacatataaaaaggagtcagcagcattctcagaaacttctttgtgatgtctgcattcaattcacagagttgagcattccctttcatagagcaggttggaaacactctttttgtagtatcttgatgaggacatttggagcgctttcaggcgtatggtgaaaaaggaaatatcttcccgtaaaaactagacagaagcattctcagaagtttatttgtgatgtgtgccctcaactaacagagttgaacctttcttttgatagagcagttttgaaacactctttttgtaaaatctgcaagaggatatttggatagctttgaggatttcgttgcaaacgggaatggcttcatataaactctagacagaagcattctcagaaacttcgttgggatgtttcgattgaagtcccagtgttgaacattcccttttatagagcaggttggaaacactctttctgcattccctggaagtggacatttggagcgctttcaggacgacagtgaaaatggaaatatcttccaagaaaatctagatagaagcaatgtcagaaacttttatgtgatggatctactcagctaacagagttgaacctttcttttgagagagcagttttgcaacactctttttgtggaatatgcaagtggatattagggcagctttgaggatttcgttggaaacgggaatacatgtaaaaagcagacagcagcattctcagaaacttctttgtgatgtttgcattgaagtcacagagttgaacattctctttgagagagcaggtttgaaacacgccttttgtcatatctggaagtgtccattcggagcgcattcaggcttgtgttgaaaaaggaaatatcctcccagaaaaactagacagaagcattctcagaaacttatctgtgatgtatgtactcaactaacagaactaaaccatcgttttgaaggagcagttttgaaacactctttttgcggaatctgcaagtggatatttggctagctgggaggatttcgttggaaacgggattacatacaaaaagcagacagcagcattctcagaaacttctttgtgatgtttgcattcaagtcacagagttgaacattccctttcatagagcaggtttgaaacactctttttgtagtatctggatgtggacatttggatcgcttcaggcctatggtgaaaaaggaaatatcttcccatgaaaactagacagaagcattctcagaagtttatttgtgatgtgtgccctcaactaacagagttgaacctttcttttgatagagcagttttgaaacactctttttgtaaaatctgcaagaggatatttggatagctttgaggatttcgttgcaaacgggaatggcttcatataaactctagacagaagcattctcagaaacttcgttgggatgtttcgattgaagtcccagtgttgagcattcccttttatagagcaggttggaaacactctttctgcattccctggaagtggacatttggagcgctttcaggacgacggtgaaaatggaaatatcttccaagaaaatctagatagaagcaatgtcagaaacttttatgtgatggatctactcagctaacagagttgaagctttcttttgagagagcagttttgcaacactctttttgtggaatatgcaagtggatattagggcagctttgaggatttcgttggaaacgggaatacatgtaaaaagcagacagcagcattctcagaaacttctttgtgatgtttgcattgaagtcacagagttgaacattccctttgagagagcaggtttgaaacacgccttttgtcatatctggaagtgtccattcggagcgcattcaggcttgtgttgaaaaaggaaatatcctcccataaaaactagacagaagcattctcagaaacttatctgtgatgtatgtactcaactaacagaactaaaccatcgttttgaaggagcagttttgaaacactctttttgcggaatctgcaagtggatatttggctagctgggaggatttcgttggaaacgggattacatacaaaaagcagacagcagcattctcagaaacttctttgtgatgtttgcattcaagtcacagagttgagcattccctttcatagagcaggttggaaacactctttttgtagtatctggatgtggacatttggatcgctttcaggcgtatggtgaaaaaggaaatatcttcccatgaaaactagacagaagcattctcagaaacttatttgtgatgtgtgcactcaactgacagtgttgaacctttgttttgatagagcagttctgaaacacactttttgtaaaatctgcaagaggatatttggatagctttgaggatttcgttggaaacgggaatgtcttcatgtgaactctagacagaagcattctcagaaactgctttgggatgtttcaattgaagtcccagtgttgaacattcccattcatagagcaggtttgaaacactctttttgtactatctggaagtggacatttggagcgctttcaggtctacggtgaaaaaggagatatcttccaataaaaactagatagaagcaatgtcagaacttttttcatgatgtatctactcagcaaacagagttgaacctttcttttgagagagcagttttgaaacactctttttgtggaatatgcaagtgggtattaggccagcttggaggatttcgttggaaacgggaatacgtataaaaagcagacagcagcattgtcagaaactactttgtgatgtttgcattcaagtcacagaattgaacactccctttcacagagcaggtttgaaacactctttttgtagtgtctgtaagtgaacatttggattgctttcaggcctaaggtgaaaaaggaaatatcttcccataaaaactagacagaagcattctcagaaacttgtttgtgatgtgtgccctctactgacagagttgaacctttctttgcaaacagcagtttgaaacactctttttgtagaatctgcaagaggatatttggatagctttgaggatttcttgggaaatgggagtgtcttcagataaactctagacagaagcattctcagcaaacttctttgggatgtttcaattgaagtcacagtgttgaacattccctttcacagagcaggtttgaaacactctttttgtagtgtctataattgaacatttggcgtgctttcaggcctaacgtgaaaaaggaaatatcttcccataaaaactagacagaagcattctcagaaacttgttcttgatgtgtcccctctactgacagagttgaacctttctttgcaaagagcagctttgaaacactctttttgtagaatctgcaagaggatatttggatggcttggaggatttcgttggaaacgggtatgtcttcagataaactctagacagaagcattctcagaaacttctttgggatgttgcattcaagtcacagagtagaacattcccattcatagagcagatttgaaacactctttttgtagtatctggaagtggacatttggagcgctttcaggcctatgttgaaaaaggaaatatcttcccataaaaactagacggaagcattctcagaaacttacttgtgatgtgtttgctcaactaacagaattgaaccatcgttttgaaggagcagttttgaaacactgttttcgtggaatctgcaagtggatatttggctagctttgaggatttcgttggaaacgggattacatataaaaaggagacagcagcattctcagaaacttctttgtgatgtctgcattcaagtcacagagttgagcattccctttcatagagcaggttgtaaacactctttttgtagtatctggatgaggacatttggagcgctttcaggcgtatggtgaaaaaggaaatatcttcccgtaaaaactagacagaagcattctcagaaatttatttgtgatgtgtgccctcaactaacagagttgaacctttcttttgatagagcagttttgaaacactctttttgtaaaatctgcaagaggatatttggatagctttgaggatttcgttgcaaacgggaatggcttcatataaactctagacagaagcattctcagaaacttcgttgggatgtttcgattgaagtcccagtgttgaacattcccttttatagagcaggttggaaacactctttctgcattccctggaagtgtacatttggagcgctttcaggacgacggtgaaaatggaaatatcttccaagaaaatctagatagaagcaacgtcagaaacttttatgtgatggatctactcagctaacagagttgaacctttcttttgagagagcagttttgcaacactctttttgtggaatatgcaagtggatattagggcagctttgaggatttcgttggaaacgggaatacatgtaaaaagcagacagcagcattctcagaaacttctttgtgatgtttgcattgaagtcacagagttgaacattccctttgagagagcaggtttgaaacacgccttttgtcatatctggaagtgtccattcggagcgcattcaggcttgtgttgaaaaaggaaatatcctcccataaaaactagacagaagcattctcagaaacttatttgtgatgtatgtactcaactaacagaactaaaccatcgttttgacggagcagttttgaaacactctttttgcggaatctgcaagtggatatttggctagctgggaggatttcgttggaaacgggattacatacaaaaagcagagagcagcattctcagaaacttatttgtgatgtgtgcactcaactgacagtgttgaacctttgttttgatagagcagttctgaaacacactttttgtaaaatctgcaagaggatatttggatagctttgaggatttcgttggaaacgggaatgtcttcatgtaaactctagacagaagcattctcagaaactgctttgggatgtttcaattgaagtcccagtgttgaacattcccattcatagagcaggtttgaaacactctttttgtactatctggaagtggacatttggagcgctttcaggtctacggtgaaaaaggagatatcttccaataaaaactagatagaagcaatgtcagaacttttttcatgatgtatctactcagctaacagagttgaacctttcttttgagagagcagttttgaaacactctttgtgtggaatatgcaagtgggtattaggccagcttggaggatttcgttggaaacgggaatacgtataaaaagcagacagcagcattgtcagaaactactttgtgatgtttgcattcaagtcacagaattgaacactccctttcacagagcaggtttgaaacactctttttgtagtgtctataagtgaacatttggcgtgctttcaggcctaaggtgaaaaaggaaatatcttcccataaaaactagacagaagcattctcagaaactagtttgtgatgtgtgccctctactgacagagttgaacctttctttgcaaagagcagttttgaaacactctttttgtagaatctgcaagaggatatttggatagctttgaggatttcttgggaaacgggaatgtcttcagataaactctagacagaagcattctcagaaacttctttgggatgtttcaattgaagtcacagtgttgaacattccctttcacagagcaggtttgaaacactctttttgtagtgtctataagtgaacatttggcgtgctttcaggcctaacgtgaaaaaggaaatatcttcccataaaaactagacagaagcattctcagaaacttgttcttgatgtgtcccctctactgacagagttgaacctttctttgcaaagagcagctttgaaacactctttttgtagaatctgcaagaggatatttggatagcttggaggatttcgttggaaacgggtatgtcttcagataaactctagacagaagcattctcagaaacttctttgggatgttgcattcaagtcacagagtagaacattcccattcatagagcagatttgaaacactctttttgtagtatctggaagtggacatttggagcgctttcaggcctatgttgaaaaaggaaatatcttcccataaaaactagacggaagcattctcagaaacttatttgtgatgtgtttgctcaactaacaggattgaaccatcgttttgaaggagcagttttgaaacactgttttcgtggaatctgcaagtggatatttggctagctttgaggatttcgttggaaacgggattacatataaaaaggagacagcaacattctcagaaacttctttgtgatgtctgcattcaagtcacagagttgagcattccctttcatagagcaggttggaaacactctttttgtagtatctggatgaggacatttggatcgctttcaggcgtatggtgaaaaaggaaatatcttcccgtaaaaactagacagaagcattctcagaaatttatttgtgatgtgtgccctcaactaaccgagttgaacctttcttttgatagagcagttttgaaacactctttttgtaaaatctgcaagaggatatttggatagctttgaggatttcgttgcaaacgggaatggcttcatataaactctagacagaagcattctcagaaacttcgttgggatgtttcgattgaagtcccagtgttgaacattcccttttatagagcaggttggaaacactctttctgcattccctggaagtggacatttggagcgctttcaggacgacggtgaaaatggaaatatcttccaagaaaatctagatagaagcaacgtcagaaacttttctgtgatggatctactcagctaacagagttgaacctttcttttgagagagcagttttgcaacactctttttgtggaatatgcaagtggatattagggcagctttgaggatttcgttggaaacgggaatacatgtaaaaagcagacagcagcattctcagaaacttctttgtgatgtttgcattgaagtcacagagttgaacattccctttgagagagcaggtttgaaacacgccttttgtcatatctggaagtgtccattcggagcgcattcaggcttgtgttgaaaaaggaaatatcctcccataaaaactagacagaagcattctcagaaacttatctgtgatgtatgtactcaactaacagaactaaaccatcgttttgaaggagcagttttgaaacactctttttgcggaatctgcaagtggatatttggctagctgggaggatttcgttggaaacgggattacatacaaaaagcagacagcagcattctcagaaacttctttgtgatgtttgcattcaagtcacagagttgaacattccctttcatagagcaggtttgaaacactctttttgtagtatctggatgtggacatttggatcgctttcaggcctatggtgaaaaaggaaatatcttcccatgaaaactagacagaagcattctcagaaacttatttgtgatgtgtgccctcaactgacagtgttgaacctttgttttgatagagcagttctgaaacacactttttgtaaaatctgcaagaggatatttggatagctttgaggatttcgttggaaacgggaatgtcttcatgtaaactctacacagaagcattctcagaaactgctttgggatgtttcaattgaagtcccagtgttgaacattcccattcatagagcaggtttgaaacactctttttctactatctggaagtggacatttggagcgctttcaggtctacggtgaaaaaggagatatcttccaataaaaactagatagaagcaatgtcagaacttttttcatgatgtatctactcagcaaacagagttgaacctttcttttgagagagcagttttgacactgtctttgtggaatatgcaagtgggtattaggccagcttggaggatttcgttggaaacgggaatacgtataaaaagcagacagcagcattgtcagaaactactttgtgatgtttgcattcaagtcacagaattgaacactccctttcacagagcaggtttgaaacactctttttgtagtgtctgtaagtgaacatttggattgctttcaggcctaaggtgaaaaaggaaatatcttcccataaaaactagacagaagcattctcagaaacttgtttgtgatgtgtgccctctactgacagagttgaaactttctttgcaaagagcagttttgaaacactctttttgtagaatctgcaagaggatatttggatagctttgaggatttcttgggaaacgggaatgtcttcagataaactctagacagaagcattctcagaaacttctttgggatgtttcaattgaagtcacagtgttgaacattccctttcacagagcaggtttgaaacactctttttgtagtgtctataagtgaacatttggcgtgctttcaggcctaacgtgaaaaaggaaatatcttcccataaaaactagacagaagcattctcagaaacttgttcgtgatgtgtgccctctactgacagagttgaacctttctttgcaaagagcagctttgaaacacactttttgtagaatctgcaagaggatatttggatagctttgaggatttcgttggaaacgggtatgtcttcagataaactctagacagaagcattctcagaaacttctttgggatgttgcattcaagtcacagagtagaacattcccattcatagagcagatttgaaacactctttttgtagtatctggaagtggacatttggagcgctttcaggcctatgttgaaaaacgaaatatcttcccataaaaactagacggaagcattctcagaaacttatttgtgatgtgtttgctcaactaacaggattgaaccatcgttttgaaggagcagttttgaaacactgttttcgtggaatctgcaagtggatatttggctagctttgaggatttcgttggaaacgggattacatataaaaaggagacagcagcattctgagaaacttcttggtgatgtctgcattcaattcacagagttgagcattccctttcatagagcaggtttgaaacactctttttgtagtatctggatgtggacatttggatcgctttcaggcctatggtgaaaaaggaaatatcttcccatgaaaactagacagaagcattctcagaaacttatttgtgatgtgtgccctcaactgacagtgttgaacctttgttttgatagagcagttctgaaacacactttttgtaaaatctgcaagaggatatttggatagctttgaggatttcgttggaaacgggaatgtcttcatgtaaactctagacagaagcattctcagaaactgctttgggatgtttcaattgaagtcccagtgttgaacattccctttcatagagcaggtttgaaacactctttttgtactatctggaagtggacatttggagcgctttcaggtctacggtgaaaaaggagatatcttccaataacaactagatagaagcaatgtcagaacttttttcatgatgtatctactcagcaaacagagttgaacctttcttttgagagagcagttttgaaacactctttttgtggaatatgcaagtgggtattagtccagcttggaggatttcgttggaaacgggaataggtataaaaagcagacagcagcattgtcagaaactactttgtgatgtttgcattcaagtcacagcaattgaacactccctttcacagagcaggtttgaaacactctttttgtagtgtctgtaagtgaacatatggattgctttcaggcctaaggtgaaaaaggaaatatcttcccataaaaactagacagaagcattctcagaaacttgtttgtgatgtgtgccctctactgacagagttgaacctttctttgcaaagagcagttttgaaacactctttttgtagaatctgcaagaggatatttggatagctttgaagatttcttgggaaacgggaatgtcttcagataaactctagacagaagcattctcagaaacttctttgggatgtttcaattgaagtcacagtgttgaacattccctttcacagagtaggtttgaaacactctttttgtagtgtctataagtgaacatttggcgtgctttcaggcctaacgtgaaaaaggaaatatcttcccataaaaactagacagaagcattctcagaaacttgttcatgatgtgtgccctctactgacagagttgaacctttctttgcaaagagcagctttgaaacactctttttgtagaatctgcaagaggatatttggatagctttgaggatttcgttggaaacgggtatgtcttcagataaactctagacagaagcattctcagaaacttctttgggatgttgcattcaagtcacagagtagaacattcccattcatagagcagatttgaaacactctttttgtagtatctggaagtggacatttggagcgctttcaggcctatgttgagaaacgaaatatcttcccataaaaactagacggaagcattctcagaaacttatttctgatgtgtttgctcaactaacagaattgaaccatcgttttgaaggagcagttttgaaaccctgttttcgtggaatctgcaagtggatatttggctagctttgaggatttcgttggaaacgggattacctataaaaaggagacagcagcattctcagaaacttctttgtgatgtctgcattcaagtcacagagttgagcattccctttcatagagcaggtttgaaacactctttttgtagtatctggatgaggacatttggagcgctttcaggcgtatggtgaaaaaggaaatatcttcccgtaaaaactagacagaagcattctcagaaatttatttgtgatgtgtgccctcaactaacagagttgaacctttcttttgatagagcagttttgaaacactctttttgtaaaatctgcaagaggatatttggatagctttgaggatttcgttgcaaacgggaatggcttcatataaactctagacagaagcattctcagaaacttcgttgggatgtttcgattgaagtcccagtgttgaacattcccttttatagagcaggttggaaacactctttttgcattccctggaagtggacatttggagcgctttcaggacgacggtgaaaatggaaatatcttccaagaaaatctagatagaagcaatgtcagaaacttttatgtgatggatctactcagctaacagagttgaagctttcttttgagagagcagttttgcaacactctttttgtggaatatgcaagtggatattagggcagctttgaggatttcgttggaaacgggaatacatgtaaaaagcagacagcagcattctcagaaacttctttgtgatgtttgcattgaagtcacagagttgaacattccctttgagagagcaggtttgaaacacgccttttgtcatatctggaagtgtccattcggagcgcattcaggcttgtgttgaaaaaggaaatatcctcccataaaaactagacagaagcattctcagaaacttatctgtgatgtatgtactcaactaacagaactaaaccatcgttttgaaggagcagttttgaaacactctttttgcggaatctgcaagtggatatttggctagctgggaggatttcgttggaaacgggattacatacaaaaagcagacagcagcattctcagaaacttctttgtgatgtttgcattcaagtcacagagttgaacattccctttcatagagcaggtttgaaacactctttttgtagtatctggatgtggacatttggatcgctttcaggcctatggtgaaaaaggaaatatcttcccatgaaaactagacagaagcattctcagaaacttatttgtgatgtgtgccctcaactgacagtgttgaacctttgttttgatagagcagttctgaaacacactttttgtaaaatctgcaagaggatatttggatagctttgaggatttcgttggaaacgggaatgtcttcatgtaaactctacacagaagcattctcagaaactgctttgggatgtttcaattgaagtcccagtgttgaacattcccattcatagagcaggtttgaaacactctttttgtactatctggaagtggacatttggagcgctttcaggtctacggtgaaaaaggagatatcttccaataaaaactagatagaagcaaagtcagaacttttttcatgatgtatctactcagctaacagagttgaacctttcttttgagagagcagttttgaaacactctttttgtggaatatgcaagtgggtattaggccagcttggaggatttcgttggaaacgggaatacgtataaaaagcagacagcagcattgtcagaaactactttgtgatgtttgcattcaagtcacagaattgaacactccctttcacagagcaggtttgaaacactctttttgaagtgtctgtaagtgaacatttggattcctttcaggcctaaggtgaaaaaggaaatatcttcccataaaaactagacagaagcattctcagaaacttgtttgtgatgtgtgccctctactgacagagttgaacctttctttgcaaagagcagttttgaaacactctttttgtagaatctgcaagaggatatttggatagctttgaggatttcttgggaaacgggaatgtcttcagataaactctagacagaagcattctcagaaacttctttgggatgtttcaattgaagtcacagtgttgaacattccctttcacagagcaggtttgaaacactctttttgtagtgtctataagtgaacatttggcgtgctttcaggcgtaacgtgaaaaaggaaatatcttcccataaaaaccagacagaagcattctcagaaacttgttcgtgatgtgtgccctctactgacagagttgaacctttctttgcaaagagcagctttgaaacacactttttgtagaatctgcaagaggatatttggatagcttggaggatttcgttggaaacgggtatgtcttcagataaactctagacagaagcattctcagaaacttctttgggatgttgcatgcaagtcacagagtagaacattcccattcatagagcagatttgaaacactctttttgtagtatctggaagaggacatttggagcgctttcaggcctatgttgaaaaaggaaatatcttcccataaaaactagacggaagcattctcagaaacttatttgtgatgtgtttgctcaactaacaggattgaaccatcgttttgaaggagcagttttgaaacactgttttcgtggaatctgcaagtggatatttggctagcttgaggatttcgttggaaacgggattacatataaaaaggagacagcagcattctcagaaacttctttgtgatgtctgcattcaattcacagagttgagcattccctttcatagagcaggttggaaacactctttttgtagtatctggatgaggacatttggagcgctttcaggcgtatggtgaaaaaggaaatatcttcccgtaaaaactagacagaagcattctcagaaatttatttgtgatgtgtgccctcaactaacagagttgaacctttcttttgatagagcagttttgaaacactctttttgtaaaatctgcaagaggatatttggatagctttgaggatttcgttgcaaacgggaatggcttcatataaactctagacagaagcattctcagaaacttcgttgggatgtttcgattgaagtcccagtgttgaacattcccttttatagagcaggttggaaacactctttctgcattccctggaagtggacatttggagcgctttcaggacgacggtgaaaatggaaatatcttccaagaaaatctagatagaagcaatgtcagaaacttttatgtgatggatctactcagctaacagagttgaacctttcttttgagagagcagttttgcaacactctttttgtggaatatgcaagtggatattagggcagctttgaggatttcgttggaaacgggaatacatgtaaaaagcagacagcagcattctcagaaacttctttgtgatgtttgcattgaagtcacagagttgaacattccctttgagagagcaggtttgaaacacgccttttgtcatatctggaagtgtccattcggagcgcattcaggcttgtgttgaaaaaggaaatatcctcccataaaaactatacagaagcattctcagaaacttatttgtgatgtatgtactcaactaacagaactaaaccatcgttttgaaggagcagttttgaaacactctttttgcggaatctgcaagtggatatttggctagctgggaggatttcgttggaaacgggattacatacaaaaagcagacagcagcattctcagaaacttctttgtgatgtttgcattcaagtcacagagttgaacattccctttcatagagcaggtttgaaacactctttttgtagtatctggatgtggacatttggatcgctttcaggcctatggtgaaaaaggaaatatcttcccatgaaaactagacagaagcattctcagaaacttatttgtgatgtgtgccctcaactgacagtgttgaacctttgttttgatagagcagttctgaaacacactttttgtaaaatctgcaagaggatatttggatagctttgaggatttcgttggaaacgggaatgtcttcatgtaaactctagacaggaagcattctcagaaactgctttgggatgtttcaattgaagtcccagtgttgaacattccctttcatagagcaggtttgaaacactctttttgtactatctggaagtggacatttggagcgctttcaggtctacggtgaaaaaggagatatcttccaataaaaactagatagaagcaatgtcagaacttttttcatgatgtatctactcagcaaacagagttgaacctttcttttgagagagcagttttgaaacactctttttgtggaatatgcaagtgggtattaggccagcttggaggatttcgttggaaacgggaatacgtataaaaagcagacagcagcattgtcagaaactactttgtgatgtttgcattcaagtcacagaattgaacactccctttcacagagcaggtttgaaacactctttttgtagtgtctgtaagtgaacatttggattgctttcaggcctaaggtgaaaaaggaaatatcttcccataaaaactagacagaagcattctcagaaacttgtttgtgatgtgtgccctctactgacagagttgaacctttctttgcaaagaccagttttgaaacactctttttgtagaatctgcaagaggatatttggatagctttgaggatttcttgggaaacgggaatgtcttcagataaactctagacagaagcattctcagaaacttctttgggatgtttcaattgaagtcacagtgttgaacattccctttcacagagcaggtttgaaacactctttttgtagtgtctataagtgaacatttggcgtgctttcaggcctaacgtgaaaaaggaaatatcttcccataaaaactagacagaagcattctcagaaacttattcatgatgtgtgccctctactgacagagttgaacctttgttttgatagagcagttctgaaacacactttttgtaaaatctgcaagaggatatttggatagctttgaggatttcgttggaaacgggtatgtcttcagataaactctagacagaagcattctcagaaacttctttgggatgttgcattcaagtcacagagtagaacattcccattcatagagcagatttgaaacactctttttgtagtatctggaagtggacatttggagcgctttcaggcctatgttgaaaaaggaaatatcttcccataaaaactagacggaagcattctcagaaacttatttgtgatgtgtttgctcaactaacaggattgaaccatcgttttgaaggagcagttttgaaacactgttttcgtagaatctgcaagtggatatttggctagctttgaggatttcgttggaaacgggattacatatacaaaggagacagcagcattctcagaaacttctttgtgatgtctgcattcaattcacagagttgagcattccctttcatagagcaggttggaaacactctttttgtagtatctggatgaggacatttggagcgctttcaggcgtatggtgaaaaaggaaatatcttcccgtaaaaactagacagaagcattctcagaagtttatttgtgatgtgtgccctcaactaacagagttgaacctttcttttgatagagcagttttgaaacactctttttgtaaaatctgcaagaggatatttggatagctttgaggatttcgttgcaaacgggaatggcttcatataaactctagacagaagcattctcagaaacttcgttgggatgtttcgattgaagtcccagtgttgaacattcccttttatagagcaggttggaaacactctttctgcattccctggaagtggacatttggagcgctttcaggacgacggtgaaaatggaaatatcttccaagaaaatctagatagaagcaacgtcagaaacttttctgtgatggatctactcagctaacagagttgaacctttcttttgagagagcagttttgcaacactctttttgtggaatatgcaagtggatattagggcagctttgaggatttcgttggaaacgggaatacatgtaaaaagcagacagcagcattctcagaaacttctttgtgatgtttgcattgaagtcacagagttgaacattccctttgagagagcaggtttgaaacacgccttttgtcatatctggaagtgtccattcggagcgcattcaggcttgtgttgaaaaaggaaatatcctccaataaaaactagacagaagcattctcagaaacttatctgtgatgtatgtactcaactaacagaactaaaccatcgttttgaaggagcagttttgaaacactctttttgcggaatctgcaagtggatatttggctagctgggaggatttcgttggaaacgggattacatacaaaaagcagacagcagcattttcagaaactactttgtgatgtttgcattcaagtcacagagttgaacattccctttcatagagcaggtttgaaacactctttttgtagtatctggatgtggacatttggatcgctttcaggcctatggtgaaaaaggaaatatcttcccatgaaaactagacagaagcattctcagaaatttatttgtgatgtgtgccctcaactaacagagttgaacctttcttttgatagagcagttttgaaacactctttttgtaaaatctgcaagaggatatttggatagctttgaggatttcgttgcaaacgggaatggcttcatataaactctagacagaagcattctcagaaacttcgttgggatgtttcgattgaagtcccagtgttgaacattcccttttatagagcaggttggaaacactctttttgcattccctggaagtggacatttggagcgctttcaggacgacggtgaaaatggaaatatcttccaataaaatctagatagaagcaatgtcagaaacttttctgtgatggatctactcagctaacagagttgaacctttcttttgagagagcagttttgcaacactctttttgtggaatatgcaagtggatattagggcagctttgaggatttcgttggaaacgggaatacatgtaaaaagcagacagcagcattctcagaaacttctttgtgatgtttgcattgaagtcacagagttgaacattccctttcagagagcaggtttgaaacacgccttttgtcatatctggaagtgtccattcggagcgcattcaggcttgtgttgaaaaagaaaatatcctcccataaaaactagacagaagcattctcagaaacttatctgtgatgtatgtactcaactaaccgaactaaaccatcgttttgaaggagcagttttgaaacactctttttgcggaatctgcaagtggatatttggctagctgggaggatttcgttggaaacgggattacatacaaaaagcagacagcagcattctcagaaacttgtttgtgatgtgtgccctcaactgacagtgttgaacctttgttttgatagagcagttctgaaacacactttttgtaaaatctgcaagaggatatttggatagctttgaggatttcgttggaaacgggaatgtcttcatgtaaactctacacagaagcattctcagaaactgctttgggatgtttcaattgaagtcccagtgttgaacattcccattcatagagcaggtttgaaacactctttttgtactatctggaagtggacatttggagcgctttcaggtctacggtgaaaaaggagatatcttccaataaaaactagatagaagcaatgtcagaacttttttcatgatgtatctactcagcaaacagagttgaacctttcttttgagagagcagttttgaaacactctttttgtggaatatgcaagtgggtattaggccagcttgaaggatttcgttggaaacgggattacgtataaaaagcagacagcagcattgtcagaaactactttgtgatgtttgcattcaagtcacagaattgaacactccctttcacagagcaggtttgaaacactctttttgtagtgtctgtaagtgaacatttggattgctttcaggcctaaggtgaaaaaggaaatatcttcccataaaaactagacagaagcattctcagaaacttgtttgtgatgtgtgccctctactgacagatttgaacctttctttgcaaagaccagttttgaaacactctttttgtagaatctgcaagaggatatttggatagctttgaggatttcttgggaaacgggaatgtcttcagataaactctagacagaagcattctcagaaacttctttgggatgtttcaattgaagtcacagtgttgaacattccctttcacagagcaggtttgaaacactctttttgtagtgtctataagtgaacatttggcgtgctttcaggcctaacgtgaaaaaggaaatatcttcccataaaaactagacagaagcattctcagaaacttgttcgtgatgtgtgccctctactgacagagttgaacctttctttgcaaagagcagctttgaaacacactttttgtagaatctgcaagaggatatttggatagcttggaggatttcgttggaaacgggtatgtcttcagataaactctagacagaagcattctcagaaacttctttgggatgttgcattcaagtcacagagtagaacattcccattcatagagcagatttgaaacactctttttgtagtatctggaagtggacatttggagcgctttcaggcctatgttgaaaaaggaaatgtcttcccataaaaactagacggaagcattctcagaaacttatttgtgatgtgtttgctcaactaacaggattgaaccatcgttttgaaggagcagttttgaaacactgttttcgtggaatctgcaagtggatatttggctagctttgaggatttcgttggaaacgggattacatatacaaaggagacagcagcattctcagaaacttctttgtgatgtctgcattcaattcacagagttgagcattccctttcatagagcacgttggaaacactctttttgtagtatctggatgaggacatttggagcgctttcaggcgtatggtgaaaaaggaaatatcttcccgtaaaaactagacagaagcattctcagaagtttatttgtgatgtgtgccctcaactaacagagttgaacctttcttttgatagagcagttttgaaacactctttttgtaaaatctgcaagaggatatttggatagctttgaggatttcgttgcaaacgggaatggcttcatataaactctagacagaagcattctcagaaacttcgttgggatgtttcgattgaagtcccagtgttgaacattcccttttatagagcaggttggaaacactctttctgcattccctggaagtggacatttggagcgctttcaggacgacggtgaaaatggaaatatcttccaagaaaatctagatagaagcaatgtcagaaacttttatgtgatggatctactcagctaacagagttgaacctttcttttgagagagcagttttgcaacactctttttgtggaatatgcaagtggatattagggcagctttgaggatttcgttggaaacgggaatacatgtaaaaagcagacagcagcattctcagaaacttctttgtgatgtttgcattgaagtcacagagttgaacattccctttgagagagcaggattgaaaaacgccttttgtcatatctggaagtgtccattcggagcgcattcaggcttgtgttgaaaaaggaaatatcctcccataaaaagtatacagaagcattctcagaaacttatttgtgatgtatgtactcaactaacagaactaaaccatcgttttgacggagcagttttgaaacactctttttgcggaatctgcaagtggatatttggctagctgggaggatttcgttggaaacgggattacatacaaaaagcagagagcagcattctcagaaacttctttgtgatgtttgcattcaagtcacagagttgaacattccctttcatagagcaggtttgaaacactctttttgtagtatctggatgtggacatttggatcgctttcaggcctatggtgaaaaaggaaatatcttcccatgaaaactagacagaagcattctcagaaacttatttgtgatgtgtgccctcaactgacagtgttgaacctttgttttgatagagcagttctgaaacacactttttgtaaaatctgcaagaggatatttggatagctttgaggagttcgttggaaacgggaatgtcttcatgtaaactctagacagaagcattctcagaaactgctttgggatgtttcaattgaagtcccagtgttgaacattcccttttatagagcaggtttgaaacactctttttgtactatctggaagtggacatttggagcgctttcaggtctacggtgaaaaaggagatatcttccaataaaaagtagatagaagcaatgtcagaacttttttcatgatgtatctactcagcaaacagagttgaacctttcttttgagagagcagttttgaaacactctttttgtggaatatgcaagtgggtattaggccagcttggaggatttcgttggaaacgggaatacgtataaaaagcagacagcagcattgtcagaaactactttgtgaggtttgcattcaagtcacagaattgaacactccctttcacagagcaggtttgaaacactctttttgtagtgtctgtaagtgaacatttggattgctttcaggcctaaggtgaaaaaggaaatatcttcccataaaaactagacagaagcattctcagaaacttgtttgtgatgtgtgccctctactgacagagttgaacctttctttgcaaagagcagttttgaaacactctttttgtagaatctgcaagaggatatttggatagctttgaggatttcttgggaaacgggaatgtcttcagataaactctagacagaagcattctcagaaacttctttgggatgtttcaattgaagtcacagtgttgaacattccctttcacagagcaggtttgaaacactctttttgtagtgtctataagtgaacatttggcgtgctttcaggcctaacgtgaaaaaggaaatatcttcccataaaaactagacggaagcattctcagaaacttgttcgtgatgtgtgccctctactgacagagttgaacctttctttgcaaagagcagctttgaaacacactttttgtagaatctgcaagaggatatttggatagctttgaggatttcgttggaaacgggtatgtcttcagataaactctagacagaagcattctcagaaatttctttgggatgttgcattcaagtcacagagtagaacattcccattcatagagcagatttgaaacactctttttgtagtatctggaagtggacatttggagcgctttcaggcctatgttgaaaaaggaaatatcttcccataaaaactagacggaagcattctcagaaacttatttgtgatgtgtttgctcaactaacaggattgaaccatcgttttgaaggagcagttttgaaacactgttttcgtggaatctgcaagtggatatttggctagctttgaggatttcgttggaaacgggattacatataaaaaggagacagcagcattctcagaaacttctttgtgctgtctgcattcaagtcacagagttgagcattccctttcatagagcaggttggaaacactctttttgtagtatctggatgaggacatttggagcgctttcaggcctatggtgaaaaaggaaatatcttcccgtaaaaactagacagaagcattctcagaaatttatttgtgatgtgtgccctcaactaacagagttgaacctttcttttgatagagcagttttgaaacactctttttgtaaaatctgcaagaggatatttggatagctttgaggatttcgttgcaaacgggaatggcttcatataaactctagacagaagcattctcagaaacttcgttgggatgtttcgattgaagtcccagtgttgaacattcccttttatagagcaggttggaaacactctttctgcattccctggaagtggacatttggagcgctttcaggacgacggtgaaaatggaaatatcttccaagaaaatctagatagaagcaacgtcagaaacttttctgtgatggatctactcagctaacagagttgaacctttcttttgagagagcagttttgcaacactctttttgtggaatatgcaagtggatattagggcagctttgaggatttcgttggaaacgggaatacatgtaaaaagcagacagcagcattctcagaaacttctttgtgatgtttgcattgaagtcacagagttgaacattccctttgagagagcaggtttgaaacacgccttttgtcatatctggaagtgtccattcggagcgcattcaggcttgtgttgaaaaaggaaatatcctcccataaaaactagacagaagcattctcagaaacttatctgtgatgtatgtactcaactaacagaactaaaccatcgttttgaaggagcagttttgaaacactctttttgcggaatctgcaagtggatatttggctagctgggaggatttcgttggaaacgggattacatacaaaaagcagacagcagcattctcagaaacttctttgtgatgtttccattcaagtcacagagttgaacattccctttcatagagcaggtttgaaacactctttttgtagtatctggatgtggacatttggatcggctttcaggcctatggtgaaaaaggaaatatcttcccatgaaaactagacagaaggattctcagaaatttatttgtgatgtgtgccctcaactaacagagttgaacctttcttttgatagagcagttttgaaacactctttttgtaaaatctgcaagaggatatttggatagcttggaggatttcattgcaaacgggaatggcttcatataaactctagacagaagcattctcagaaacttcgttgggatgtttcgattgaagtcccagtgttgaacattcccttttatagagcaggttggaaacactctttctgcattccctggaagtggacatttggagcgctttcaggacgacggtgaaaatggaaatatcttccaataaaatctagatagaagcaacgtcagaaacttttatgtgatggatctactcagctaacagagttgaacctttcttttgagagagcagttttgcaacactctttttgtggaatatgcaagtggatattagggcagctttgaggatttcgttggaaacgggaatacatgtaaaaaacagacagcagcattctcagaaacttctttgtgatcttttcattgaagtcacagagttgaacattccctttgagagagcaggtttgaaacacgccttttgtcatatctggaagtgtccattcggagcgcattcaggcttgtgttgaagaaggaaatatcctcccataaaaactagacagaagcattctcagaaacttatctgtgatgtatgtactcaactaacagaactaaaccatcgttttgaaggagcagttttgaaacactctttttgcggaatctgcaagtggatatttggctagctgggaggatttcgttggaaacgggattacatacaaaaagcagacagcagcattctcagaaacttctttgtgatgtttgcattcaagtcacagagttgaacattccctttcatagagcaggtttgaaacactctttttgtagtatctggatgtggacatttggatcgctttcaggcctatggtgaaaaaggaaatatcttcccatgaaaactagacagaagcattctcagaaacttatttgtgatgtgtgccctcaactgacagtgttgaacctttgttttgatagagcagttctgaaacacactttttgtaaaatctgcaagaggatatttggatagctttgaggatttcgttggaaacgggaatgtcttcatgtaaactctagacagaagcattctcagaaactgctttgggatgtttctattgaagtcccagtgttgaacattccctttcatagagcaggtttgaaacactctttttgtagtatctggaagtggacatttggagcgctttcaggtctacggtgaaaaaggagatatcttccaataaaaactagatagaagcaatgtcagaacttttttcatgatgtatctactcagcaaacagagttgaacctttcttttgagagagcagttttgaaacactctttttgtggaatatgcaagtgggtattaggccagcttggaggatttcgttggaaacgggaatacgtataaaaagcagacagcagcattgtcagaaactactttgtgatgtttgcattcaagtcacagaattgaacactccctttcacagagcaggtttgaaacactctttttgtagtgtctgtaagtgaacatttggattgctttcaggcctaaggtgaaaaaggaaatatcttcccataaaaactagacagaagcattctcagaaacttgtttgtgatgtgtgccctctactgacagagttgaacctttctttgcaaagagcagttttgaaacactctttttgtagaatctgcaagaggatatttggatagctttgaggatttcttgggaaacgggaatgtcttcagataaactctagacagaagcattctcagaaacttctttgggatatttcaattgaagtcacagtgttgaacattccctttcacagagcaggtttgaaacactctttttgtagtgtctataagtgaacatttggcgtgctttcaggcctaacgtgaaaaaggaaatatcttcccataaaaactagacagaagcattctcagaaacttgttcgtgatgtgtgccctctactgacagagttgaacctttctttgcaaagagcagctttgaaacacactttttgtagaatctgcaagaggatatttggatagctttgaggatttcgttggaaacgggtatgtcttcagataaactctagacagaagcattctcagaaacttctttgggatgttgcattcaagtcacagagtagaacattcccattcatagagcagatttgaaacactctttttgtagtatctggaagtggacatttggagcgctttcaggcctatgttgaaaaaggaaatatcttcccataaaaactagacggaagcattctcagaaacttaattgtgatgtgtttgctcaactaacaggattgaaccatcgttttgaaggagcagttttgaaacactgttttcgtggaatctgcaagtggatatttggctagctttcaggatttcgttggaaacgggattacatataaaaaggagacagcagcattctcagaaacttctttgtgatgtttgcattcaagtcacagagttgaacattccctttcatagagcaggtttgaaacactctttttgtagtatctggatgtggacatttggatcgctttcaggcctatggtgaaaaaggaaatatcttcccatgaaaactagacagaagcattctcagaaacttatttgtgatgtgtgccctcaactgacagtgttgaacctttgttttgatagagcagttctgaaacacactttttgtaaaatctgcaagaggatatttggatagctttgaggatttcgttggaaacgggaatgtcttcatgtaaactctagacagaagcattctcagaaactgctttgggatgtttcaattgaagtcccagtgttgaacattcccattcatagagcaggtttgaaacactctttttgtagtatctggaagtggacatttggagggatttcaggtctacggtgaaaaaggagatatcttccaataaaaactagatagaagcaatgtcagaacttttttcatgatgtatctactcagcaaacagagttgaacctttcttttgagagagcagttttgaaacactctttttgtggaatatgcaagtgggtattaggccagcttggaggatttcccttggaaacgggaatacgtataaaaagcagacagcagcattgtcagaaactactttgtgatgtttgcattcaagtcacagaattgaaaactccctttcacagagcaggtttgaaacactctttttgtagtgtctgtaagtgaacatttggattgctttcaggcctaaggtgaaaaaggaaatatcttcccataaaaactagacagaagcattctcagaaacttgtttgtgatgtgtgccctctactgacagagttgaacctttctttgcaaagagcagttttgaaacactctttttgtagaatctgcaagaggatgtttggatagctttgaggatttcttgggaaacgggaatgtcttcagataaactctagacagaagcattctcagaaacttctttgggatgtttcaattgaagtcacagtgttgaacattccctttcacagagcaggtgtgaaacactctttttgtagtgtctataagtgaacatttggcgtgctttcaggcctaacgtgaaaaaggaaatatcttcccataaaaactagacagaagcattctcagaaacttgttcgtgatgtgtgccctctactgacagagttgaacctttctttgcaaagagcagctttgaaacactctttttgtagaatctgcaagaggatatttggatagctttgaggatttcgttggaaacgggtatgtcttcagataaactctagacagaagcattctcagaaacttctttgggatgttgcattcaagtcacagagtagaacattcccattcatagagcagatttgaaacactcttttgtagtatctggaagtggacatttggaacgctttcaggcctatgttgaaaaaggatatatcttcccataaaaactagacggaagcattctcagaaacttatttgtgatgtgtttgctcaactaacaggattgaaccatcgttttgaaggagcagttttgaaacactgttttcgtggaatctgcaagtggatatttggctagctttgaggatttcgttggaaacgggattacatataaaaaggagacagcagcattctcagaaacttctttgtgatgtctgcattcaattcacagagttgagcattccctttcatagagcaggttggaaacactctttttgtagtatctggatgaggacatttggagcgctttcaggcgtatggtgaaaaaggaaatatcttcccgtaaaaactagacagaagcattctcagaagtttatttgtgatgtgtgccctcaactaacagagttgaacctttcttttgatagagcagttttgaaacactctttttgtaaaatctgcaagaggatatttggatagctttgaggatttcgttgcaaacgggaatggcttcatataaactctagacagaagcattctcagaaacttcgttgggatgtttcgattgaagtcccagtgttgaacattcccttttatagagcaggttggaaacactctttctgcattccctggaagtggacatttggagcgctttcaggacgacggtgaaaatggaaatatcttccaagaaaatctagatagaagcaacgtcagaaacttttctgtgatggatctactcagctaacagagttgaacctttcttttgagagagcagttttgcaacactctttttgtggaatatgcaagtggatattagggcagctttgaggatttcgttggaaacgggaatacatgtaaaaagcagacagcagcattctcagaaacttctttgtgatgtttgcattgaagtcacagagttgaacattccctttgagagagcaggtttgaaacacgccttttgtcatatctggaagtgtccattcggagcgcattcaggcttgtgttgaaaaaggaaatatcctcccataaaaactagacagaagcattctcagaaacttatctgtgatgtatgtactcaactaacagaactaaaccatcgttttgaaggagcagttttgaaacactctttttgcggaatctgcaagtggatatttggctagctgggaggatttcgttggaaacgggattacatacaaaaagcagacagcagcattctcagaaacttctttgtgatgtttgcattcaagtcacagagttgaacattccctttcatagagcaggttggaaacactctttttgtagtatctggatgtggacatttggatcgctttcaggcctatggtgaaaaaggaaatatcttcccatgaaaactagacagaagcattctcagaaacttatttgtgatgtgtgccctcaactgacagtgttgaacctttgttttgatagagcagttctgagacacactttttgtaaaatctgcaagaggatatttggatagctttgaggatttcgttggaaacgggaatgtcttcatgtaaactctagacagaagcattctcagaaactgctttgggatgtttcaattgaagtcccagtgttgaacattccctttcatagagcaggtttgaaacactctttttgtactatctggaagtggacatttggagcgctttcaggtctacggtgaaaaaggagatatcttccaataaaaactagatagaagcaatgtcagaacttttttcatgatgtatctactcagcaaacagagttgaacctttcttttgggagagcagttttgaaacactctttttgtggaatatgcaagtgggtattaggccagcttggaggaattcgttggaaacgggaatacgtataaaaagcagacagcagcattgtcagaaactactttgtgatgtttgcattcaagtcacagaattgaacactccctttcacagagcaggtttgaaacactctttttgtagtgtctgtaagtgaacatatggattgctttcaggcctaaggtgaaaaaggaaatatcttcccataaaaactagacagaagcattctcagaaacttatttgtgatgtgtgccctctactgacagagttgaacctttctttgcaaagagcagctttgaaacactctttttgtagaatctgcaagaggatatgtggatagctttgaggatttcgttggaaacgggtatgtcttcagataaactctagacagaagcattctcagaaacttctttgggatgtttcaattgaagtcacagtgttgaacattccctttcacagagcaggtttgaaacactctttttgtagtgtctataagtgaacatttggcgtgctttcaggcctaacgtgaaaaaggaaatatcttcccataaaaactagacagaagcattctcagaaacttgttcttgatgtgtcccctctactgacagagttgaacctttctttgcaaagagcagctttgaaacactctttttgtagaatctgcaagaggatatttggatagcttggaggatttcgttggaaacgggtatgtcttcagataaactctagacagaagcattctcagaaacttctttgggatgttgcattcaagtcacagagtagaacattcccattcatagagcagatttgaaacactctttttgtagtatctggaagtggacatttggagcgctttcaggcctatgttgaaaaaggaaatatcttcccataaaaactagacggaagcattctcagaaacttatttgtgatgtgtttgctcaactaacaggattgaaccatcgttttgaaggagcagttttgaaacactgttttcgtggaatctgcaagtggatatttggctagctttgaggatttcgttggaaacgggattacatataaaaaggagacagcagcattctcagaaacttctttgtgatgtctgcattcaagtcacagagttgagcattccctttcatagagcaggttggaaacactctttttgtagtatctggatgaggacatttggagcgctttcaggcctatggtgaaaaaggaaatatcttcccgtaaaaactagacagaagcattctcagaagtttatttgtgatgtgtgccctcaactaacagagttgaacctttcttttgatagagcagttttgaaacactctttttgtaaaatctgcaagaggatatttggatagctttgaggatttcgttgcaaacgggaatggcttcatataaactctagacagaagcattctcagaaacttcgttgggatgtttcgattgaagtcccagtgttgaacattcccttttataaagcaggttggaaacactctttctgcattccctggaagtggacatttggagcgctttcaggacgacggtgaaaatggaaatatcttccaagaaaatctagatagaaagcaatgtcagaaacttttatgtgatggatctactcagctaacagcagttgaacctttcttttgagagagcagttttgcaacactctttttgtggaatatgcaagtggatattagggcagctttgaggatttcgttggaaacgggaatacatgtaaaaagcagacagcagcattctcagaaacttctttgtgatgtttgcattgaagtcacagagttgaacattccctttgagagagcaggtttgaaacacgccttttgtcatatctggaagtgtccattcggagcgcattcaggcttgtgttgaaaaaggaaatatcctcccataaaaactagacagaagcattctcagaaacttatctgtgatgtatgtactcaactaacagaactaaaccatcgttttgaaggagcagttttgaaacactctttttgcggaatctgcaagtggatatttggctagctgggaggatttcgttggaaacgggattacatacaaaaagcagacagcagcattctcagaaacttctttgtgatgtttgcattcaagtcacagagttgaacattccctttcatagagcaggtttgaaacactctttttgtagtatctggatgtggacatttggatcgctttcaggcctatggtgaaaaaggaaatatcttcccatgaaaactagacagaagcattctcagaaacttatttgtgatgtgtgccctcaactgacagtgttgaacctttgttttgatagagcagttctgaaacacactttttgtaaaatctgcaagaggatatttggatagctttgaggatttcgttggaaacgggaatgtcttcatgtaaactctacacagaagcattctcagaaactgctttgggatgtttcaattgaagtcccagtgttgaacattcccattcatagagcaggtttgaagcactctttttgtactatctggaagtggacatttggaacgctttcaggtctacggtgaaaaaggagatatcttccaataaaaactagatagaagcaatgtcagaacttttttcatgatgtatctactcagcaaacagagttgaacctttcttttgagagagcagttttgaaacactctttttgtggaatatgaaagtgggtattaggccagcttggaggatttcgttggaaacgggaatacgtataaaaagcagacagcagcattgtcagaaactactttgtgatgtttgcattcaagtcacagaactgaacactccctttcacagagcaggtttgaaacactctttttgtagtgtctgtaagtgaacatttggattgctttcaggcctaaggtgaaaaaggaaatatcttcccataaaaactagacagaagcattctcagaaacttgtttgtgatgtgtgccctctactgacagagttgaacctttctttgcaaagagcagttttgaaacactttttgtagaatctgcaagaggatatttggatagctttgaggatttcttgggaaacgggaatgtcttcagataaactctagacagaagcattctcagaaacttctttgggatgtttcaattgaagtcacagtgttgaacattccctttcacagagcaggtttgaaacactctttttgtagtgtctataattgaacatttggcgtgctttcaggcctaacgtgaaaaaggaaatatcttcccataaaaactagacagaagcattctcagaaacttgttcatgatgtgtgccctctactgacagagttgaacctttctttgcaaagagcagctttgaaacactctttttgtagaatctgcaagaggatatttggatagctttgaggatttctttggaaacgggtatgtcttcagataaactctagacagaagcattctcagaaacttctttgggatgttgcattcaagtcacagagtagaacattcccattcatagagcagatttgaaacactctttttgtagtatctggaagtggacatttggagcgctttcaggcctatgttgaaaaaggaaatatcttcccataaaaactagacggaagcattctcagaaacttatttgtgatgtgtttgctcaacaaacaggattgaaccatcgttttgaaggagcagttttgaaacactgttttcgtggaatctgcaagtggatatttggctagctttgaggatttcgttggaaacgggattacatataaaaaggagacagcagcattctcagaaacttctttgtgatgtctgcattcaattcacagagttgagcattccctttcatagagcaggttggaaacactctttttgtagtatctggatgaggacatttggagcgctttcaggcgtatggtgaaaaaggaaatatcttcccgtaaaaactagacagaagcattctcagaagtttatttgtgatgtgtgccctcaactaacagagttgaacctttcttttgatagagcagttttgaaacactctttttgtaaaatctgcaagaggatatttggatagctttgaggatttcgttgcaaacgggaatggcttcatataaactctagacagaagcattctcagaaacttcgttgggatgtttcgattgaagtcccagtgttgaacattcccttttatagagcaggttggaaacactctttctgcattccctggaagtggacatttggagcgctttcaggacgacggtgaaaatggaaatatcttccaagaaaatctagatagaagcaatgtcagaaacttttatgtgatggatctactcagctaacagagttgaacctttcttttgagagagcagttttgcaacactctttttgtggaatatgcaagtggatattagggcagctttgaggatttcgttggaaacgggaatacatgtaaaaagcagacagcagcattctcagaaacttctttgtgatgtttgcattgaagtcacagagttgaacattccctttgagagagcaggattgaaacacgccttttgtcatatctggaagtgtccattcggagcgcattcaggcttgtgttgaaaaaggaaatatcctcccataaaaagtatacagaagcattctcagaaacttatttgtgatgtatgtactcaactaacagaactaaaccatcgttttgacggagcagttttgaaacactctttttgcggaatctgcaagtggatatttggctagctgggaggatttcgttggaaacgggattacatacaaaaagcagagagcagcattctcagaaacttatttgtgatgtgtgccctcaactgacagtgttgaacctttgttttgatagagcagttctgaaacacactttttgtaaaatctgcaagaggatatttggatagctttgaggatttcgttggaaacgggaatgtcttcatgtaaactctacacagaagcattctcagaaactgctttgggatgtttcaattgaagtcccagtgttgaacattccctttcacagagcaggtttgaaacactctttttgtactatctggaagtggacatttggagcgctttcaggtctacggtgaaaaaggagatatcttcccataaaaactagatagaagcaatgtcagaacttttttcatgatgtatctactcagcaaacagagttgaacctttcttttgagagagcagttttgaaacactctttttgtggaatatgcaagtgggtattaggccagcttggaggatttcgttggaaacgggaatacgtataaaaagcagacagcagcattgtcagaaactactttgtgatgtttgcattcaagtcacagaattgaacactccctttcacagagcaggtttgaaacactctttttgtagtgtctgtaagtgtacatttggattgctttcaggcctaaggtgaaaaaggaaatatcttcccataaaaactagacagaagcattctcagaaacttgtttgtgatgtgtgccctctactgacagagttgaacctttctttgcaaagagcagttttgaaacactctttttgtagaatctgcaagaggatatttggatagctttgaagatttcttgggaaacgggaatgtcttcagataaactctagacagaagcattctcagaaacttctttgggatgtttcaattgaagtcacagtgttgaacattccctttcacagagcaggtttgaaacactctttttgtagtgtctataattgaacatttggcgtgctttcaggcctaacgtgaaaaaggaaatatcttcccataaaaactagacagaagcattctcagaaacttgttcgtgatgtgtgccctctactgacagagttgaacctttctttgcaaagagcagctttgaaacactctttttgtagaatctgcaagaggatatttggatagctttgaggatttcgttggaaacgggtatgtcttcagataaaatctagacagaagcattctcagaaacttctttgggatgttgcattcaagtcacagagtagaacattcccattcatagagcagatttgaaacactctttttgtagtatctggaagtggacatttggagcgctttcaggcctatgttgaaaaaggaaatatcttcccataaaaactagacggaagcattctcagaaacttacttgtgatgtgtttgctcaactaacagaattgaaccatcgttttgaaggagcagttttgaaacactgttttcgtggaatctgcaagtggatatttggctagctttgaggatttcgttggaaacgggattacatataaaaaggagacagcagcattctcagaaacttctttgtgatgtctgcattcaattcacagaagttgagcattccctttcatagagcaggttggaaacactctttttgtagtatctggatgaggacatttggagcgctttcaggcgtatggtgaaaaaggaaatatcttcccgtaaaaactagacataagcattctcagaaatttatttgtgatgtgtgccctcaactaacagagttgaacctttcttttgatagagcagttttgaaacactctttttgtaaaatctgcaagaggatatttggatggctttgaggatttcgttgcaaacgggaatggcttcatataaactctagacagaagcattctcagaaacttcgttgggatgtttcgattgaagtcccagtgttgaacattcccttttatagagcaggttggaaacactctttctgcattccctggaagtggacatttggagcgctttcaggacgacggtgaaaatggaaatatcttccaagaaaatctagatagaagcaacgtcagaaacttttctgtgatggatctactcagctaacagagttgaacctttcttttgagagagcagttttgcaacactctttttgtggaatatgcaagtggatattagggcagctttgaggatttcgttggaaacgggaatacatgtaaaaagcagacagcagcattctcagaaacttctttgtgatgtttgcattgaagtcacagagttgaacatcccctttgagagagcaggtttgaaacacgccttttgtcatatctggaagtgtccattcggagcgcattcaggcttgtgttgaaaaaggaaatatcctcccataaaaactagacagaagcattctcagaaacttatctgtgatgtatgtactcaactaacagaactaaaccatcgttttgaagggcagttttgaaacactctttttgcggaatctgcaagtggatatttggctagctgggaggatttcgttggaaacgggattacatacaaaaagcagacagcagcattctcagaaacttatttgtgatgtgtgccctcaactgacagtgttgaacctttgttttgatagagcagttctgaaacacactttttgtaaaatctgcaagaggatatttggatagctttgaggatttcgttggaaacgggaatgtcttcatgtaaacttctagacagaagcattctcagaaactgctttgggatgtttcaattgaagtcccagtgttgaacattcccattcatagagcaggtttgaaacactctttttgtactatctggaagtggacatttggagcgctttcaggtctacggtgaaaaaggagatatcttccaataaaaactagatagaagcaatgtcagaacttttttcatgatgtatctactcagcaaacagagttgaacctttcttttgagagagcagttttgaaacactccttttgtggaatatgcaagtgggtattaggccagcttggaggatttcgttggaaacgggaatacgtataaaaagcagacagcagcattgtcagaaactactttgtgatgtttgcattcaagtcacagaaattgaacactccctttcacagagcaggtttgaaactctctttttgtagtgtctataagtgaacatttggcgtgctttcaggcgtaacgtgaaaaaggaaatatcttcccataaaaactagacagaagcattctcagaaacttgtttgtgatgtgtgccctctactgacagagttgaacctttctttgcaaagagcagttttgaaacactctttttgtagaatctgcaagaggatatttggatagctttgaggatttcttgggaaacgggaatgtcttcagataaactctagacagaagcattctcagaaacttctttgggatgttgcattcaagtcacagagtagaacattcccattcatagagcaggtttgaaacactctttttgtagtatctggaagtggacatttggagcgctttcaggcctatgttgaaaaaggatatattttcccataaaaactagacagaagcattctcagaaacttacttctgacgtgtttactcaactaacagaattgaaccatcattttgaaggagcagttttgaaacactgtttttgtgggatctgcaagtggatatttggctagctttgaggatttcgttggaaacgggattatatataaaaaggagacagcagcattctcagaaactattttgtgatgtctgcattcaagtcaaagagttgagcattccctttcatagagcaggtttgaaacagtctttttgtagtatctggatgaggacatttggagcgctttcaggcgtatggtgaaaaaggaaatatcttcccgtaaaaactagacagaagcattctcaaaaatttacttgtgatgtgtgccctcaactatcagagttgaacctttcttttgatagagcagttttgaaacactctttttgtaaaatctgcaagaggatatttggatagctttgaggatttcgttgcaaacgggaatggcttcatataaactctagacagaagccttctcagaaacttcgttgggatgttttgattgaagtcacagtgttgaacattcccttttatagagcaggtttgaaacactctttttgtagtatctggaagtggacatttggagcgctttcaggacgacggtgaaaatggaaatatcttccaataaaatctagatagaagcaatgtcagaaactttcatgtcatgtatctactcagctaacagagttgaaactttcttttgagaaagcagttttgcaacactcttttcgtggaatatgcaagtggatattagggcagctttgaggattttgttggaaacggcaatacatataaaaagcagacagcagcattctcagaaacttcttcgtgatgtttgctttgaagtcacagagttgaacattccctttgagagagcaggtttgaaacacgccttttgtcatatctggaagtgtccattcggagcgcattcaggcttgtgttgaaaaaggaaatatcctcccataaaaactagacagaagcattctcagaaactgatttgtgatgtatgtactcaactaacagaactaaaccatcgttttgaaggagcagttttgaaacactctttttgcggaatctgcaagtggatatttggctagcttggaggatttcgttggaaacgggattacatacaaaaagcagacagccagcattctcagaaacttctttgtgatgtttgcattcaagtcacagagttgaacattccctttcatagagcaggtttgaaacactctttttgtagtatctggatgtggacatttggatcgctttcaggcctatggtgaaaaaggaaatatcttcccatgaaaactagacagagcattctcagaaacttatttgtgatgtgtgccctcaactgacagtgttgaacctttgttttgatagagcagttctgaaacacactttttgtaaaatctgcaagaggatatttggatagctttgaggatttcgttggaaacgggaatgtcttcatgtaaactctagacagaagcattctcagaaactgctttgggatgtttcaattgaagtcccagtgttgaacattccctttcatagagcaggtttgaaacactctttttgtactatctggaagtggacatttggagcgctttcaggtctatggtgaaaaaggagatatcttccaataaaaactagatagaagcaatgtcagaacttttttcatgatgtatctactcagcaaacagagttgaacctttcttttgagagagcagttttgaaacactctttttgtggaatatgcaagtgggtattaggccagcttggaggatttcgttggaaacgggaatacgtataaaaagcagacagcagcattgtcagaaactactttgtgatgtttgcattcaagtcacagaattgaacactccctttcacagagcaggtttgaaacactctttttgtagtgtctgtaagtgaacatttggattgctttcaggcctaaggtgaaaaaggaaatatcttcccataaaaactagacagaagcattctcagaaacttgtttgtgatgtgtgccctctactgacagagttgaacctttctttgcaaagagcagttttgaaacactctttttgtagaatctgcaagaggatatttggatagctttgaggatttcttgggaaacgggaatgtcttcagataaactctagacagaagcattctcagaaacttctttgggatgtttcaattgaagtcacagtgttgaacattccctttcacagagcaggtttgaaacactctttttgtagtgtctataagtgaacatttggcgtgctttcagttgtaacgtgaaaaaggaaatatcttcccataaaaactagacagaagcattctcagaaacttgttcgtgatgtgtgccctctactgacagagttgaacctttctttgcaaagagcagctttgaaacactctttttgtagaatctgcaagaggatatttggatagcttggaggatttcgttggaaacgggtatgtcttcagataaactctagacagaagcattctcagaaacttctttgggatgttgcattcaagtcacagagtagaacattcccattcatagagcagatttgaaacactctttttgtcgtatctggaagtggacatttggagcgctttcaggcctatgttgaaaaaggaaatatcttcccataaaaactacacggaagcattctcagaaacttatttgtgatgtgtttgctcaactaacaggattgaaccatcgttttgaaggagcagttttgaaacactgttttcgtggaatctgcaagtggatatttggctagctttgaggatttcgttggaaacgggattacatataaaaaggagacagcagcattctcagaaacttctttgtgatgtctgcattcaagtcacagagttgagcattccctttcatagagcaggttggaaacactctttttgtagtatctggatgaggacatttggagcgctttcaggcgtatggtgaaaaaggaaatatcttcccgtaaaaactagacagaagcattctcagaagtttatttgtgatgtgtgccctcaactaacagagttgaacctttcttttgatagagcagttttgaaacactctttttgtaaaatctgcaagaggatatttggatagctttgaggatttcgttgcaaacgggaatggcttcatataaactctagacagaagcattctcagaaacttcgttgggatgtttcgattgaagtcccagtgttgaacattcccttttatagagcaggttggaaacactctttctgcattccctggaagtggacatttggagcgctttcaggacgacggtgaaaatggaaatatcttccaagaaaatctagatagaagcaatgtcagaaacttttatgtgatggatctactcagctaacagagttgaacctttcttttgagagagcagttttgcaacactctttttgtggaatatgcaagtggatattagggcagctttgaggatttcgttggaaacgggaatacatgtaaaaagcagacagcagcattctcagaaacttctttgtgatgtttgcattgaagtcacagagttgaacattccctttgagagagcaggtttgaaacacgtcttttgtcatatctggaagtgtccattcggagcgcattcaggcttgtgttgaaaaaggaaatatcctcccataaaaactagacagaagcattctcagaaacttatctgtgatgtatgtactcaactaaccgaactaaaccatcgttttgaaggagcagttttgaaacactctttttgcggaatctgcaagtggatatttggctagctgggaggatttcgttggaaacgggattacatacaaaaagcagacagcagcattctcagaaacttatttgtgatgtgtgccctcaactgacagtgttgaacctttgttttgatagagcagttctgaaacacactttttgtaaaatctgcaagaggatatttggatagctttgaggatttcgttggaaacgggaatgtcttcatgtaaactctagacagaagcattctcagaaactgctttgggatgtttcaattgaagtcccagtgttgaacattccctttcatagagcaggtttgaaacactctttttgtactatctggaagtggacatttggagcgctttcaggtctacggtgaacaaggagatatcttccaataaaaactagatagaagcaatgtcagaacttttttcatgatgtatctactcagcaaacagagttgaacctttcttttgagagagcagttttgaaacactctttttgtggaatatgcaagtgggtattaggccagcttggaggatttcgttggaaacgggaatacgtataaaaagcagacagcagcattgtcagaaactactttgtgatgtttgcattcaagtcacagaattgaacactccctttcacagagcaggtttgaaacactctttttgtagtgtctgtaagtgaacatttggattgcttcaggcctaaggtgaaaaaggaaatatcttcccataaaaactagacagaagcattctcagaaacttgtttgtgatgtgtgccctctactgacagagttgaacctttctttgcaaagagcagttttgaaacactctttttgtagaatctgcaagaggatatttggatagctttgaggatttcttgggaaacgggaatgtcttcagataaactctagacagaagcattctcagaaacttctttgggatgtttcaattgaagtcacagtgttgaacattccctttcacagagcaggtttgaaacactctttttgtagtgtctataagtgaacatttggcgtgctttcaggcgtaacgtgaaaaaggaaatatcttcccataaaaactagacagaagcattctcagaaacttgttcttgatgtgtcccctctactgacagagttgaacctttctttgcaaagagcagctttgaaacactctttttgtagaatctgcaagaggatatttggatagcttggaggatttcgttggaaacgggtatgtcttcagataaactctagacagaagcattctcagaaacttctttgggatgttgcattcaagtcacagagtagaacattcccattcatagagcagatttgaaacactctttttgtagtatctggaagtggacatttggagcgctttcaggcctatgttgaaaaaggaaatatcttcccataaaaactagacggaagcattctcagaaacttatttgtgatgtgtttgctcaactaacaggattgaaccatcgttttgaaggagcagttttgaaacactgttttcgtggaatctgcaagtggatatttggctagctttgaggatttcgttggaaatgggattacatatacaaaggagacagcagcactctcagaaacttctttgtgatgtctgcattcaagtcacagagttgagcattccctttcatagagcaggttggaaacactctttttgtagtatctggatgaggacatttggagcgctttctggcctatggtgaaaaaggaaatatcttcctgtaaaaactagacagaagcattctcagaagtttatttgtgatgtgtgccctcaactaacagagttgaacctttcttttgatagagcagttttgaaacactctttttgtaaaatctgcaagaggatatttggatagctttgaggatttcgttgcaaacgggaatggcttcatataaactctagacagaagcattctcagaaacttcgttgggatgtttcgattgaagtcccagtgttgaacattcccttttatagagcaggttggaaacactctttctgcattccctggaagtggacatttggagcgctttcaggacgacggtgaaaatggaaatatcttccaagaaaatctagatagaagcaatgtcagaaacttttatgtgatggatctactcagctaacagagttgaacctttcttttgagagagcagttttgcaacactctttttgtggaatatgcaagtggatattagggcagctttgaggatttcgttggaaacgggaatacatgtaaaaagcagacagcagcattctcagaaacttctttgtgatgtttgcattgaagtcacagagttgaacattccctttgagagagcaggtttgaaacacgccttttgtcatatctggaagtgtccattcggagcgcattcaggcttgtgttgaaaaaggaaatatcctcccataaaaactaggacggaagcattctcagaaacttatctgtgatgtatgtactcaactaacagaactaaaccatcgttttgaaggagcagttttgaaacactctttttgcggaatctgcaagtggatatttggctagctgggaggatttcgttggaaacgggattacatacaaaaagcagacagcagcattctcagaaacttctttgtgatgtttgcattcaagtcacagagttgaacattccctttcatagagcaggtttgaaacactctttttgtagtatctggatgtggacatttggatcgctttcaggcctatggtgaaaaaggaaatatcttcccatgaaaactagaccgaagcattctcagaaacttatttgtgatgtgtgccctcaactgacagtgttgaacctttgttttgatagagcagttctgaaacacactttttgtaaaatctgcaagaggatatttggatagctttgaggatttcgttggaaacgggaatgtcttcatgtaaactctagacagaagcattctcagaaactgctttgggatgtttcaattgaagtcccagtgttgaacattcccattcatagagcaggtttgaaacactctttttgtactatctggaagtggacatttggagcgctttcaggtctacggtgaaaaaggagatatcttccaataaaaactagatagaagcaatgtcagaacttttttcatgatgtatctactcagcaaacagagttgaacctttcttttgagagagcagtttcgaaacactctttctgtggaatatgcaagtgggtattaggccagcttggaggatttcgttggaaacgggaatacgtataaaaagcagacagcagcattgtcagaaactactttgtgatgtttgcattcaagtcacagaattgaacactccctttcacagagcaggttagaaacactctttttgtagtgtctgtaagtgaacatttggattgctttcaggcctaaggtgaaaaaggaaatatcttcccataaaaactagacagaagcattctcagaaacttgtttgtgatgtgtgccctctactgacagagttgaacctttctttgcaaagagcagttttgaaacactctttttgtagaatctgcaagaggatatttggatagctttgaggatttcttgggaaacgggaatgtcttcagataaactctagacagaagcattctcagaaacttctttgggatgtttcaattgaagtcacagtgttgaacattccctttcacagagcaggtttgaaacactctttttgtagtgtctataagtgaacatttggcgtgctttcaggcctaacgtgaaaaaggaaatatcttcccataaaaactagacagaagcattctcagaaacttgttcgtgatgtgtgccctctactgacagagttgaacctttctttgcaaagagcagctttgaaacacactttttgtagaatctgcaagaggatatttggatagtgtttgaggatttcgttggaaacgggtatgtcttcagataaactctagacagaagcattctcagaaacttctttgggatgttgcattcaagtcacagagtagaacattcccattcatagagcagatttgaaacactctttttgtagtatctggaagtggacatttggagcgctttcaggcctatgttgaaaaaggaaatatcttcccataaaaactagacggaagcattctcagaaacttatttgtgatgtgtttgctcaactaacaggattgaaccatcgttttgaaggagcagttttgaaacactgttttcgtggaatctgcaagtggatatttggctagctttgaggatttcgttggaaacgggattacatataaaaaggagacagcagcattctcagaaacttctttgtgatgtctgcattcaattcacagagttgagcattccctttcatagagcaggttggaaacactctttttgtagtatctggatgaggacatttggagcgctttcaggcctatggtgaaaaaggaaatatcttcccatgaaaactagacagaagcattctcagaaacttatttgtgatgtgtgcactcaactgacagtgttgaacctttgttttgatagagcagttctgaaacacactttttgtaaaatctgcaagaggatatttggatagctttgaggatttcgttggaaacgggaatgtcttcatgtaaactctagacagaagcattctcagaaactgctttgggatgtttcaattgaagtcccagtgttgaacattcccattcatagagcaggtttgaaacactctttttctactatctggaagtggacatttggagcgctttcaggtctacggtgaaaaaggagatatcttccaataaaaactagatagaagcaatgtcagaacttttttcatgatgtatctactcagcaaacagagttgaacctttcttttgagagagcagttttgacactgtctttgtggaatatgcaagtgggtattaggccagcttggaggatttcgttggaaacgggaatacgtataaaaagcagacagcagcattgtcagaaactactttgtgatgtttgcattcaagtcacagaattgaacactccctttcacagagcaggtttgaaacactctttttgtagtgtctgtaagtgaacatttggattgctttcaggcctatggtgaaaaaggtaatatcttcccataaaaactagacagaagcattctcagaaacttgtttgtgatgtgtgccctctactgacagagttgaacctttctttgcaaagagcagttttgaaacactctttttgtagaatctgcacgaggatatttggatagctttgaggatttcttgggaaacgggaatgtcttcagataaactctagacagaagcattctcagaaacttctttgggatgtttcaattgaagtcacagtgttgaacattccctttcacagagcaggtttgaaacactctttttgtagtgtctataagtgaacatttggcgtgctttcaggcgtaacgtgaaaaaggaaatatcttcccataaaaaccagacagaagcattctcagaaacttgttcgtgatgtgtgccctctactgacagagttgaacctttctttgcaaagagcagctttgaaacacactttttgtagaatctgcaagaggatatttggatagctttgaggatttcgttggaaacgggtatgtcttcagatatactctagacagaagcattctcagaaacttctttgggatgttgcattcaagtcacagagtagaacattcccattcatagagcagatttgaaacactctttttgtagtatctggaagtggacatttggagcgctttcaggcctatgttgaaaaaggaaatatcttcccataaaaactagacggaagcattctcagaaacttatttgtgatgtgtttgctcaactaacaggattgaaccatcgttttgaaggagcagttttgaaacactgttttcgtggaatctgcaagtggatatttggctagctttgaggatttcgttggaaacgggattacatataaaaaggagacagcagcattctcagaaacttctttgtgatgtttgcattcaagtcacagagttgaacattccctttcatagagcaggtttgaaacactctttttgtagtatctggatgtggacatttggatcgctttcaggcctatggtgaaaaaggaaatatcttcccatgaaaactagacagaagcattctcagaaacttatttgtgatgtgtgcactcaactgacagtgttgaacctttgttttgatagagcagttctgaaacacaatttttgtaaaatctgcaagaggatatttggatagctttgaggatttcgttggaaacgggaatgtcttcatgtaaactctagacagaagcattctcagaaactgctttgggatgtttcaattgaagtcccagtgttgaacattcccattcatagagcaggtttgaaacactctttttgtactatctggaagtggacatttggagcgctttcaggtctacggtgaaaaaggagatatcttccaataaaaactagatagaagcaatgtcagaacttttttcatgatgtatctactcagcaaacagagttgaacctttcttttgagagagcagttttgaaacactctttttgtggaatatgcaagtgggtattaggccagcttggaggatttcgttggaaacgggaatacgtataaaaagcagacagcagaattgtcagaaactactttgtgatgtttgcattcaagtcacagaattgaacactccctttcacagagcaggtttgaaacactctttttgtagtgtctgtaagtgaacatttggattgctttcaggcgtaaggtgaaaaaggaaatatcttcccataaaaactagacagaagcattctcagaaacttgttcttgatgtgtgccctctactgacagagttgaacctttctttgcaaagagcagttttgaaacactctttttgtagaatctgcaagaggatatttggatagctttgaggatttcttgggaaacgggaatgtcttcagataaactctagacagaagcattctcagaaacttctttgggatgtttcaattgaagtcacagtgttgaacattccctttcacagagcaggtttgaaacactctttttgtagtgtctataagtgaacatttggcgtgctttcaggcctaacgtgaaaaaggaaatatcttcccataaaaactagacagaagcattctcagaaacttgttcgtgatgtgtgccctctactgacagagttgaacctttctttgcaaagagcagctttgaaacactctttttgtagaatctgcaagaggatatttggatagctttgaggatttcgttggaaacgggtatgtcttcagataaacttctagacagaagcattctcagaaacttctttgggatgttgcattcaagtcacagagtagaacattcccattcatagagcagatttgaaacactctttttgtagtatctggaagtggacatttggagcgctttcaggcctatgttgaaaaaggaaatatcttcccataaaaactagacggaagcattctcagaaacttatttgtgatgtgtttgctcaactaacaggattgaaccatcgttttgaaggagcagttttgaaacactgttttcgtggaatctgcaagtggatatttggctagctttgaggatttcgttggaaacgggattacatataaaaaggagacagcagcattctcagaaacttctttgtgatgtctgcattcaattcacagagttgagcattccctttcatagagcaggttggaaacactctttttgtagtatctggatgaggacatttggagcgctttcaggcgtatggtgaaaaaggaaatatcttcccgtaaaaactagacagaagcattctcagaagtttatttgtgatgtgtgccctcaactaacagagttgaacctttcttttgatagagcagttttgaaacactctttttgtaaaatctgcaagaggatatttggatagctttgaggatttcgttgcaaacgggaatggcttcatataaactctagacagaagcattctcagaaacttcgttgggatgtttcgattgaagtcccagtgttgaacattccctttaatagagcaggttggaaacactctttctgcattccctggaagtggacatttggagcgctttcaggacgacggtgaaaatggaaatatcttccaagaaaatctagatagaagcaatgtcagaaacttttatgtgatggatctactcagctaacagagttggacctttcttttgagagagcagttttgcaacactctttttgtggaatatgcaagtggatattagggcagctttgaggatttcgttggaaacgggaatacatgtaaaaagcagacagcagcattctcagaaacttctttgtgatgtttgcattgaagtcacagagttgaacattccctttgagagagcaggtttgaaacacgccttttgtcatatctggaagtgtccattcggagcgcattcaggcttgtgttgaaaaaggaaatatcctcccataaaaactagacagaagcattctcagaaacttatctgtgatgtatgtactcaactaacagaactaaaccatcgttttgaaggagcagttttgaaacactctttttgcggaatctgcaagtggatatttggctagctgggaggatttcgttggaaacgggattacatacaaaaagcagacagcagcattctcagaaacttctttgtgatgtttgcattcaagtcacagagttgaacattccctttcatagagcaggtttgaaacactctttttgtagtatctggatgtggacatttggatcgctttcaggcctatggtgaaaaaggaaatatcttcccatgaaaactagaccgaaacattctcagaaacttatttgtgatgtgtgccctcaactgacagtgttgaacctttgttttgatagagcagttctgaaacacactttttgtaaaatctgcaagaggatatttggatagctttgaggatttcgttggaaacgggaatgtcttcatgtaaactctagacagaagcattctcagaaactgctttgggatgtttcaattgaagtcccagtgttgaacattccctttcataggagcaggtttgaaacactctttttgtactatctggaagtggacatttggagcgctttcaggtctacggtgaaaaaggagatatcttccaataaaaactagatagaagcaatgtcagaacttttttcatgatgtatctactcagcaaacagagttgaacctttcttttgagagagcagttttgaaacactctttttgtggaatatgcaagtgggtattaggccagcttggaggatttcgttggaaacgggaatacgtataaaaagcagacagcagcattgtcagaaactactttgtgatgtttgcattcaagtcacagaattgaacactccctttcacagagcaggtttgaaacactctttttgtagtgtctgtaagtgtacatttggattgctttcaggcctaaggtgaaaaaggaaatatcttcccataaaaactagacagaagcattctcagaaacttgtttgtgatgtgtgccctctactgacagagttgaacctttctttgcaaagagcagttttgaaacactctttttgtagaatctgcaagaggatatttggatagctttgaggatttcttgggaaacgggaatgtcttcagataaactctagacagaagcattctcagaaacttctttgggatgtttcaattgaagtcacagtgttgaacattccctttcacagagcaggtttgaaacactctttttgtagtgtctataagtgaacatttggcgtgctttcaggcgtaacgtgaaaaaggaaatatcttcccataaaaaccagacagaagcattctcagaaacttgttcctgatgtgtgccctctaactgacagagttgaacctttctttgcaaagagcagctttgaaacactctttttgtagaatctgcaagaggatatttggatagctttgaggatttcgttggaaacggggatgtcttcagataaactctagacagaagcattctcagaaacttctttgggatgttgcattcaagtcacagagtagaacattcccattcatagagcagatttgaaacactctttttgtagtatctggaagtggacatttggagcgctttcaggcctatgttgaaaaaggaaatatcttcccataaaaactagacggaagcattctcagaaacttatttgtgatgtgtttgctcaactaacaggattgaaccatcgttttgaaggagcagttttgaaacactgttttcgtggaatctgcaagtggatatttggctagctttgaggatttcgttggaaacgggattacatataaaaaggagacagcagcattctcagaaacttctttgtgatgtttgcattgaagtcacagagttgaacattccctttgagagagcaggtttgcaacacgccttttgtcatatctggaagtgtccattcggagcgcattcaggcttgtgttgaaaaaggaaatatcctcccataaaaactagacagaagcattctcagaaacttatttgtgatgtatgtactcaactaacagaactaaaccatcgttttgaaggagcagttttgaaacactctttttgcggaatctgcaactggatatttggctagcttggaggatttcgttggaaacgggattacataaaaaagcagacagcagcattctcagaaacttctttgtgatgtttgcattcaagtcgcagagttgaacattccctttcatagagcaggtttgaaacactctttttgtagtatctggatgtggacatttggatcgctttcaggcctatggtgaaaaaggaaatatcttcccatgaaaactagacagaagcattctcagaaacttatttgtgatgtgtgccctcaactgacagtgttgaacctttgttttgatagagcagttctgaaacacactttttgtaaaatctgcaagaggatatttggatagctttgaggatttcgttggaaacgggaatgtcttcatgtaaactctagacagatgcattctcagaaactgctttgggatgtttcaattgaagtcccagtgttgaacattccctttcatagagcacgtttgaaacactctttttgtactatctggaagtggacatttggagcgctttcaggtctacggtgaaaaaggagatatcttccaataaaaactagatagaagcaatgtcagaacttttttcatgatgtatctactcagcaaacagagttgaacctttcttttgagagagcagttttgaaacactctttttgtggaatatgcaagtgggtattaggccagcttggaggatttcgttggaaacgggaatacgtataaaaagcagacagcagcattgtcagaaactactttgtgatgtttgcattcaagtcacagaattgaacactccctttcacagagcaggttagaaacactctttttgtagtgtctgtaagtgaacatttggattcctttcaggcctaaggtgaaaaaggaaatatcttcccataaaaactagacagaagcattctcagaaacttgtttgtgatgtgtgccctctactgacagagttgaacctttctttgcaaagagcagttttgaaacactctttttgtagaatctgcaagaggatatttggatagctttgaggatttcttgggaaacgggaatgtcttcagataaactctagacagaagcattctcagaaacttctttgggatgtttcaattgaagtcacagtgttgaacattccctttcacaggagcaggtttgaaacactctttttgtagtgtctataagtgaacatttggcgtgctttcaggcctaacgtgaaaaaggaaatatcttcccataaaaactagacagaagcattctcagaaacttgttcgtgatgtgtgccctctactgacagagttgaacctttctttgcaaagagcagctttgaaacactctttttgtagaatctgccagaggatatttggatagctttgaggatttcgttggaaacgggtatgtcttcagataaactctagacagaagcattctcagaaacttctttgggatgttgcattcaagtcacagagtagaacattcccattcatagagcagatttgaaacactctttttgtagtatctggaagtggacatttggagcgctttcaggcctatgttgaaaaaggaaatatcttcccataaaaactagacggaagcattctcagaaacttatttgtgatgtgtttgctcaactaacaggattgaaccatcgttttgaaggagcagttttgaaacactgttttcgtggaatctgcaagtggatatttggctagctttgaggatttcgttggaaatgggattacatatacaaaggagacagcagcattctcagaaacttctttgtgatgtctgcattcaattcacagagttgagcattccctttcatagagcaggttggaaacactctttttgtagtatctggatgaggacatttagagcgctttctggcctatggtgaaaaaggaaatatcttcctgtaaaaactagacagaagcattctcagaagtttatttgtgatgtgtgccctcaactaacagagttgaacctttcttttgatagagcagttttgaaacactctttttgtaaaatctgcaagaggatatttggatagctttgaggatttcgttgcaaacgggaatggcttcatataaactctagacagaagcattctcagaaacttcgttgggatgtttcgattgaagtcccagtgttgaacattcccttttatagagcaggttggaaacactctttctgcattccctggaagtggacatttggagcgctttcaggacgacggtgaaaatggaaatatcttccaagaaaatctagatagaagcaacgtcagaaacttttctgtgatggatctactcagctaacagagttgaacctttcttttgagagagcagttttgcaacactctttttgtggaatatgcaagtggatattagggcagctttgaggatttcgttggaaacgggaatacatgtaaaaagcagacagcagcattctcagaaacttctttgtgatgtttgcattgaagtcacagagttgaacattccctttgagagagcaggtttgaaacacgccttttgtcatatctggaagtgtccattcggagcgcattcaggcttgtgttgaaaaaggaaatatcctcccataaaaactagacagaagcattctcagaaacttatctgtgatgtatgtactcaactaacagaactaaaccatcgttttgaaggagcaattttgaaacactctttttgcggaatctgcaagtggatatttggctagctgggaggatttcgttggaaacgggattacatacaaaaagcagacagcagcattctcagaaacttatttgtgatgtgtgccctcaactgacagtgttgaacctttgttttgatagagcagttctgaaacacactttttgtaaaatctgcaagaggatatttggatagctttgaggatttcgttggaaacgggaatgtcttcatgtaaactctagacagaagcattctcagaaaatgctttgggatgtttcaattgaagtcccagtgttgaacattccctttcatagagcaggtttgaaacactctttttgtagtatctggaagtggacatttggagcgctttcaggtctacggtgaaaaaggagatatcttccaataaaaactagatagaagcaatgtcagaacttttttcatgatgtatctactcagcaaacagagttgaacctttcttttgagagagcagttttgaaacactcttttggtggaatatgcaagtgggtattaggccagcttggaggatttcgttggaaacgggaatacgtataaaaagcagacagcagcattgtcagaaactactttgtgatgtttgcattcaagtcacagaattgaacactccctttcacagagcaggtttgaaactctctttttgtagtgtctgtaagtgaacatttggattgatttcaggcctaaggtgaaaaaggaaatatcttcccataaaaactagacagaagcattctcagaaacttgtttgtgatgtgtgccctctactgacagagttgaacctttctttgcaaagagcagttttgaaacactctttttgtagaatctgcaagaggatatttggatagctttgaggatttcttgggaaacgggaatgtcttcagataaactctagacagaagcattctcagaaacttctttgggatgtttcaattgaagtcacagtgttgaacattccctttcacagagcaggtttcaaacactctttttgtagtgtctataagtgaacatttggcgtgctttcaggcctaacgtgaaaaaggaaatatcttcccataaaaactagacagaagcattctcagaaacttgttcgtgatgtgtgccctctactgacagagttgaacctttctttgcaaagaccagctttgaaacacactttttgtagaatctgcaagaggatatttggatagctttgaggatttcgttggaaacgggtatgtcttcagataaactctagacagaagcattctcagaaacttctttgggatgttgcattcaagtcacagagtagaacattcccattcatagagcagatttgaaacactctttttgtagtatctggaagtggacatttggagcgctttcaggcccatgttgaaaaaggaaatatcttcccataaaaactagacggaagcattctcagaaacttacttgtgatgtgtttgctcaactaacaggattgaaccatcgttttgaaggagcagttttgaaacaatgttttcgtagaatctgcaagtggatatttggctagtttgaggatttggttggaaacgggattacatataaaaaggagacagcagcattctcagaaacttctttgtgatgtctgcattcaagtcacagagttgagcattccctttcatagagcaggttggaaacactctttttgtagtatctggatgaggacatttggagcgctttcaggcgtatggtgaaaaaggaaatatcttcccgtaaaaactagacagaagcattctcagaaatttatttgtgatgtgtgccctcaactaacagagttgaacctttcttttgatagagcagttttgaaacactctttttgtaaaatctgcaagaggatatttggatagctttgaggatttcattgcaaacgggaatggcttcatataaactctagacagaagcattctcagaaacttcgttgggatgtttccgattgaagtcccagtgttgaacattcccttttatagagcaggttggaaaaactctttctgcattccctggaagtggacatttggagcgctttcaggacgacggtgaaaatggaaatatcttccaataaaatctagatagaagcaacgtcagaaacttttatgtgatggatctactcagctaacagagttgaacctttcttttgagagagcagttttgcaacactctttttgtggaatatgcaagtggatattagggcagctttgaggatttcgttggaaacgggaatacatgtaaaaagcagacagcagcattctcagaaacttctttgtgatgtttgcattgaagtcacagagttgaacattccctttgagagagcaggtttgaaacacgccttttgtcatatctggaagtgtccattcggagcgcattcaggcttgtgttgaaaaaggaaatatcctcccataaaaactagacagaagcattctcagaaacttatctgtgatgtatgtactcaactaacagaactaaaccatcgttttgaaggagcagttttgaaacactctttttgcggaatctgcaagtggatatttggctagctgggaggatttcgttggaaacgggattacatacaaaaagcagacagcagcattctcagaaacttctttgtgatgtttgcattcaagtcacagagttgaacattccctttcatagagcaggtttgaaacactctttttgtagtatctggatgtggacatttggatcgctttcaggcctatggtgaaaaaggaaatatcttcccatgaaaactagacagaagcattctcagaaacttatttgtgatgtgtgccctcaactgacagtgttgaacctttgttttgatagagcagttctgaaacacactttttgtaaaatctgcaagaggatatttggatagctttgaggatttcgttggaaacgggaatgtcttcatgtaaactctagacagaagcattctcagaaactgctttgggatgtttcaattgaagtcccagtgttgaacattcccattcatagagcaggtttgaaacactctttttctactatctggaagtggacatttggagcgctttcaggtctacggtgaaaaaggagatatcttccaataaaaactagatagaagcaatgtcagaacttttttcatgatgtatctactcagcaaacagagttgaacctttgttttgagagagcagttttgacactgtctttgtggaatatgcaagtgggtattaggccagcttggaggatttcgttggaaacgggaatacgtataaaaagcagaaagcagcattgtcagaaactactttgtgatgtttgcattcaagtcacagaattgaacactccctttcacagagcaggtttgaaacactctttttgtagtgtctgtaagtgaacatttggattgctttcaggcctaaggtgaaaaaggaaatatcttcccataaaaactagacagaagcattctcagaaacttgtttgtgatgtgtgccctctactgacagagttgaacctttctttgcaaagaccagttttgaaacactctttttgtagaatctgcaagaggatatttggatagctttgaggatttcttgggaaacgggaatgtcttcagataaactctagacagaagcattctcagaaacttctttgggatgtttcaattgaagtcacagtgttgaacattccctttcacagagcaggtttgcaacactctttttgtagtgtctataagtgaacatttggcgtgctttcaggcctaacgtgaaaaaggaaatatcttcccataaaaactagacagaagcattctcagaaacttgttcgtgatgtgtgccctctactgacagagttgaacctttctttgcaaagagcagctttgaaacacactttttgtagaatctgcaagaggatatttggatagctttgaggatttcgttggaaacgggtatgtcttcagataaactctagacagaagcattctcagaaatttctttgggatgttgcatgcaagtcacagagtagaacattcccattcatagagcagatttgaaacactctttttgtactatctggaagtggacatttggagcgctttcaggcctatgttgaaaaaggaaatatcttcctataaaaactagacggaagcattctcagaaacttaattgtgatgagtttgctcaactaacaggattgaaccatccttttgaaggagcagttttgaaacactgttttcgtggaatctgcaagtggatatttggctagctttgaggatttcgttggaaacgggattacatataaaaaggagacagcagcattctcagaaacttctttgtgatgtctgcattcaattcacagagttgagcattccctttcctagagcacgttggaaacactctttttgtagtatctggatgaggacatttggagcgctttcaggcgtatggtgaaaaaggaaatatcttcccgtaaaaactagacagaagcattctcagaagtttatttgtgatgtgtgccctcaactaacagagttgaacctttcttttgatagagcagttttgaaacactctttttgtaaaatctgcaagaggatatttggatagctttgaggatttcgttgcaaacgggaatggcttcatataaactctagacagaagcattctcagaaacttcgttgggatgtttcgattgaagtcccagtgttgaacattcccttttatagagcaggttggaaacactctttctgcattccctggaagtggacatttggagcgctttcaggacgacggtgaaaatggaaatatcttccaagaaaatctagatagaagcaacgtcagaaacttttctgtgatggatctactcagctaacagagttgaacctttcttttgagagagcagttttgcaacactctttttgtggaatatgcaagtggatattagggcagctttgaggatttcgttggaaacgggaatacatgtaaaaagcagacagcagcattctcagaaacttctttgtgatgtttgcattgaagtcacagagttgaacattccctttgagagagcaggtttgaaacacgccttttgtcatatctggaagtgtccattcggagcgcattcaggcttgtgttgaaaaaggaaatatcctcccagaaaaactagacagaagcattctcagaaacttatctgtgatgtatgtactcaactaacagaactaaaccatcgttttgaaggagcagttttgaaacactctttttgcggaatctgcaagtggatatttggctagctgggaggatttcgttggaaacgggattacatacaaaaagcagacagcagcattctcagaaacttctttgtgatgtttgcattcaagtcacagagttgaacattccctttcatagagcaggtttgaaacactctttttgtagtatctggatgtggacatttggatcgctttcaggcctatggtgaaaaaggaaatatcttcccatgaaaactagacagaagcattctcagaaacttatttgtgatgtgtgccctcaactgacagtgttgaacctttgttttgatagagcagttctgaaacacactttttgtaaaatctgcaagaggatatttggatagctttgaggatttcgttggaaacgggaatgtcttcatgtaaactctagacagaagcattctcagaaactgctttgggatgtttcaattgaagtcccagtgttgaacattccctttcatagagcaggtttgaaacactctttttgtagtatctggatgaggacatttggagcgctttcaggcgtatggtgaaaaaggaaatatcttcccgtaaaaactagacagaagcattctcagaaatttatttgtgatgtgtgccctcaactaacagagttgaacctttcttttgatagagcagttttgaaacactctttttgtaaaatctgcaagaggatatttggatagctttgaggatttcgttgcaaacgggaatggcttcatataaactctagacagaagcattctcagaaacttcgttgggatgtttcgattgaagtcccagtgttgaacattcccttttatagagcaggttggaaacactctttttgcattccctggaagtggacatttgtagcgctttcaggacgatggtgaaaatggaaatatcttccaataaaatctagatagaagcaatgtcagaaacttttatgtgatggatctactcagctaacagagttgaacctttcttttgagagagcagttttgcaacactctttttgtggaatatgcaagtggatattagggcagctttgaggatttcgttggaaacgggaatacatgtaaaaagcagacagcagcattctcagaaacttctttgtgatgtttgcattgaagtcacagagttgaacattccctttgagagagcaggtttgaaacacgccttttgtcatatctggaagtgtccattcggagcgcattcaggtttgtgttgaaaaaggaaatatcctcccataaaaactagacagaagcattcacagaaacttatttgtgatgtatgtactcaactaacagaactaaaccatcgttttgaaggagcagttttgaaacaccctttttgcggaatctgcaactggatatttggctagcttggaggatttcgttggaaacgggattacatacaaaaagcagacagcagcattctcagaaacttctttgtgatgtttgcattcaagtcgcagaggtgaacattccctttcatagagcaggtttgaaacactctttttgtagtatccggatgtggacatttggatcgctttcaggcctatggtgaaaaaggaaatatcttcccatgaaaactagacagaagcattctcagaaacttatttgtgatgtgtgccctcaactgacagtgttgaacctttgttttgatagagcagttctgaaacacactttttgtaaaatctgcaagaggatatttggatagctttgaggatttcgttggaaacgggaatgtcttcatgtaaactctagacagaagcattctcagaaactgctttgggatgtttctattgaagtcccagtgttgaacattccctttcatagagcaggtttgaaacactctttttgtagtatctggaagtggacatttggagcgctttcaggtctacggtgaaaaaggagatatcttccaataaaaactagatagaagcaatgtcagaacttttttcatgatgtatctactcagcaaacagagttgaacctttcttttgagagagcagttttgaaacactctttttgtggaatatgcaagtgggtattaggccagcttggaggatttcgttggaaacgggaatacgtataaaaagcagacagcagcattgtcagaaactactttgtgatatttgcattcaagtcacagaattgaacactccctttcacagagcaggtttgaaaaactctttttgtagtgtctgtaagtgaacatttggattgctttcaggcctaaggtgaaaaaggaaatatcttcccataaaaactagacagaagcattctcagaaacttgtttgtgatgtgtgccctctactgacagagttgaacctttctttgcaaagagcagttttgaaacactctttttgtagaatctgcaagaggatatttggatagctttgaggatttcttgggaaacgggaatgtcttcagataaactctagacagaagcattctcagaaacttctttgggatgtttcaattgaagtcacagtgttgaacattccctttcacagagcaggtttgaaacactctttttgtagtgtctataagtgaacatttggcgtgctttcaggcgtaacgtgaaaaaggaaatatcttcccataaaaactagacagaagcgttctcagaaacttgttcttgatgtgtgccctctactgacagagttgaacctttctttgcaaagagcagctttgaaacactctttttgtagaatctgcaagaggatatttggatagctttgaggatttcgttggaaacgggtatgtcttcagataaactctagacagaagcattctcagaaacttctttgggatgttgcattcaagtcacagagtagaacattcccattcatagagcagatttgaaacactctttttgtagtatctggaagtggacatttggagcgctttcaggcctatgttgaaaaaggaaatatcttcccataaaaactagacggaagcattctcagaaacttacttgtgatgtgtttgctcaactaacaggattgaaccatcgttttgaaggagcagttttgaaacaatgttttcgtagaatctgcaagtggatatttggctagtttgaggatttggttggaaacgggattacatataaaaaggagacagcagcattctcagaaacttctttgtgatgtctgcattcaattcacagagttgagcattccctttcatagagcaggttggaaacactctttttgtagtatctggatgaggacatttggagcgctttcaggcctatggtgaaaaaggaaatatcttcccgtaaaaactagacagaagcattctcagaagtttatttgtgatgtgtgccctcaactaacagagttgaacctttcttttgatagagcagttttgaaacactctttttgtaaaatctgcaagaggatatttggatagctttgaggatttcgttgcaaacgggaatggcttaatataaactctagacagaagcattctcagaaacttcgttgggatgtttcgattgaagtcccagtgttgaacattcccttttatagagcaggttggaaacactctttctgcattccctggaagtggacatttggagcgctttcaggacgacggtgaaaatggaaatatcttccaagaaaatctagatagaagcaatgtcagaaacttttctgtgatggatctactcagctaacagagttgaacctttcttttgagagagcagttttgcaacactctttttgtggaatatgcaagtggatattagggcagctttgaggatttcgttggaaacgggaatacatgtaaaaagcagacagcagcattctcagaaacttctttgtgatgtttgcattgaagtcacagagttgaacattccctttgagagagcaggtttgaaacacgccttttgtcatatctggaagtgtccattcggagcgcattcaggcttgtgttgtaaaaggaaatatcctcccataaaaactagacagaagcattctcagaaacttatctgtgatgtatgtactcaactaacagaactaaaccatcgttttgaaggagcagttttgaaacactctttttgcggaatctgcaagtggatatttggctagctgggaggatttcgttggaaacgggattacatacaaaaagcagacagcagcattctcagaaacttctttgtgatgtttgcactcaagtcacagagttgaacattccctttcatagagcaggtttgaaacactctttttgtagtatctggatgtggacatttggatcgctttcaggcctatggtgaaaaaggaaatatcttcccatgaaaactagacagaagcattctcagtagtttatttgtgatgtgtgccctcaactaacagagttgaacctttcttttgatagagcagttttgaaacactctttttgtaaaatctgcaagaggatatttggatagctttgaggatttcgttgtaaacgggaatggcttcatataaactctagacagaagcattctcagaaacttcgttgggatgtttcgattgaagtcccagtgttgaacattcccttttatagagcaggttggaaacactctttctgcattccctggaagtggacatttggagcgctttcaggacgacggtgaaaatggaaatatcttccaagaaaatctagatagaagcaatgtcagaaacttttatgtgatggatctactcagctaacagagttgaacctttcttttgagagagcagttttgcaacactctttttgtggaatatgcaagtggatattagggcagctttgaggatttcgttggaaacgggaatacatgtaaaaagcagacagcagcattctcagaaacttctttgtgatgtttgcattgaagtcacagagttgaacattccctttgagagagcaggtttgaaacacgccttttgtcatatctggaagtgtccattcggagcgcattcaggcttgtgttgaaaaaggaaatatcctcccagaaaaactagacagaagcattctcagaaacttatctgtgatgtatgtactcaactaacagaactaaaccattgttttgaaggagcagttttgaaacactctttttgcggaatctgcaagtggatatttggctagctgggaggatttcgttggaaacgggattacatacaaaaagcagacagcagcattctcagaaacttctttgtgatgtttgcattcaagtcacagagttgaacattccctttcatagagcaggtttgaaacactctttttgtagtatctggatgtggacatttggattgctttcaggcctatggtgaaaaaggaaatatcttcccatgaaaactagacagaagcattctcagaaacttatttgtgatgtgtgccctcaactgacagtgttgaacctttgttttgatagagcagttctgaaacacactttttgtaaaatctgcaagaggatatttggatagctttgaggatttcgttggaaacgggaatgtcttcatgtaaactctagacagaagcattctcagaaactgctttgggatgtttcaattgaagtcccagtgttgaacattccctttcatagagcaggtttgaaacactctttttgtactatctggaagtggacatttggagcgctttcaggtctacggtgaaaaaggagatatcttccaataaaaactagatagaagcaatgtcagaacttttttcatgatgtatctactcagcaaacagagttgaacctttcttttgagagagcagttttgaaacactctttttgtggaatatgcaagtgggtattaggccagcttgaaggatttcgttggaaacgggattacgtataaaaagcagacagcagcattgtcagaaactactttgtgatgtttgcattcaagtcacagaattgaacactccctttcacagtagcaggtttgaaacactctttttgtagtgtctgtaagtgaacatttggattgctttcaggcctaaggtgaaaaaggaaatatcttcccataaaaactagacagaagcattctcagaaacttgtttgtgatgtgtgccctctactgacagagttgaacctttctttgcaaagagcagttttgaaacactctttttgtagaatctgcaagaggatatttggatagctttgaggatttcttgggaaacgggaatgtcttcagataaactctagacagaagcattctcagaaacttctttgggatgtttcaattgaagtcacagtgttgaacattccctttcacagagcaggtttgaaacactctttttgtagtgtctataagtgaacatttggcgtgctttcaggcgtaacgtgaaaaaggaaatatcttcccataaaaactagacagaagcattctcagaaacttgttcgtgatgtgtgccctctactgacagagttgaacctttctttgcaaagagcagctttgaaacacactttttgtagaatctgcaagaggatatttggatagctttgatgatttcgttggaaacgggtatgtcttcagataaactctagacagaagcattctcagaaacttctttgggatgttgcattcaagtcacagagtagaacattcccattcatacagcagatttgaaacactctttttgtagtatctggaagtggacatttggagcgctttcaggcctatgttgaaaaagcaaatatcttcccataaaaactagacggaagcattctcagaaacttacttgtgatgtgtttgctcaactaacagaattgaaccatcgttttgaaggagcagttttgaaacactgttttcgtggaatctgcaagtggatatttggctagctttgaggatttcgttggaaacgggattacatataaaaaggagacagcagcattctcagaaacttctttgtgatgtctgcattcaattcacagagttgagcattccctttcatagagcaggttggaaacactctttttgtagtatctggatgaggacatttggagcgctttcaggcctatggtgaaaaaggaaatatcttcccgtaaaaactagacagaagcattctcagaaatttatttgtgatgtgtgccctcaactaacagagttgaacctttcttttgatagagcagttttgaaacactctttttgtaaaatctgcaagaggatatttggatagctttgaggatttcattgcaaacgggaatggcatcatataaactctagacagaagcattctcagaaacttcgttgggatgtttcgattgaagtcccagtgttgaacattcccttttatagagcaggttggaaacactctttctgcattccctggaagtggacatttggagcgctttcaggacgacggtgaaaatggaaatatcttccaataaaatctagatagaagcaacgtcagaaacttttatgtgatggatctactcagctaacagagttgaacctttcttttgagagagcagttttgcaacactctttttgtggaatatgcaagtggatattagggcagctttgaggatttcgttggaaacgggaatacatgtaaaaaacagacagcagcattctcagaaacttctttgtgatgtttgcattgaagtcacagagttgaacattccctttgagagagcaggtttgaaacacgccttttgtcatatctggaagtgtccattcggagcgcattcaggcttgtgttgaaaaaggaaatatcctcccataaaaactagacagaagcattctcagaaacttatctgtgatgtatgtactcaactaacagaactaaaccatcgttttgaaggagcagttttgaaacactctttttgcggaatctgcacgtggatatttggctagctgggaggatttcgttggaaacgggattacatacaaaaagcagacagcagcattctcagaaacttctttgtgatgttagcattcaagtcacagagttgaacattccctttcatagagcaggtttgaaacactctttttgtagtatctggatgtggacatttggatcgctttcaggcctatggtgaaaaaggaaatatcttcccatgaaaactagacagaagcattctcagaaatttatttgtgatgtgtgccctcaactaacagagttgaacctttcttttgatagagcagttttgaaacactctttttgtaaaatctgcaagaggatatttggatagctttgaggatttcgttgcaaacgggaatggcttcatataaactctagacagaagcattctcagaaacttcgttgggatgtttcgattgaagtcccagtgttgaacattcccttttatagagcaggttggaaacactctttctgcattccctggaagtggacatttggagcgctttcaggacgacggtgaaaatggaaatatcttccaagaaaatctagatagaagcaatgtcagaaacttttatgtgatggatctactcagctaacagagttgaacctttcttttgagagagcagttttgcaacactctttttgtggaatatgcaagtggatattagggcagctttgaggatttcgttggaaacgggaatacatgtaaaaagcagacagcagcattctcagaaacttctttgtgatgtttgcattgaagtcacagagttgaacattccctttgagagagcaggtttgaaacacgccttttgtcatatctggaagtgtccattcggagcgcattcaggcttgtgttgaaaaaggaaatatcctcccataaaaactagacagaagcattctcagaaactgatttgtgatgtatgtactcaactaacagaactaaaccatcgttttgaaggagcagttttgaaacactctttttgcggaatctgcaagtggatatttggctagcttggaggatttcgttggaaacgggattacatacaaaaagcagacagcagcattctcagaaacttatttgtgatgtgtgccctcaactgacagtgttgaacctttgttttgatagagcagttctgaaacacactttttgtaaaatctgcaagaggatatttggatagctttgaggatttcgttggaaacgggaatgtcttcatgtaaactctacacagaagcattctcagaaactgctttgggatgtttcaattgaagtcccagtgttgaacattcccattcatagagcaggtttgaaacactctttttgtactatctggaagtggacatttggagcgctttcaggtctacggtgaaaaaggagatatcttccaataaaaactagatagaagcaatgtcagaacttttttcatgatgtatctactcagctaacagagttgaacctttcttttgagagagcagttttgaaacactctttttgtggaatatgcaagtgggtattaggccagcttggaggatttcgttggaaacgggaatacgtataaaaagcagacagcagcattgtcagaaactactttgtgatgtttgcattcaagtcacagaattgaacactccctttcacagagcaggtttgaaacactctttttgtagtgtctataagtgaacatttggcgtgctttcaggcctaacgtgaaaaaggaaatatcttcccataaaaactagacagaagcattctcagaaacttgtttgtgatgtgtgccctctactgacagagttgaacctttctttgcaaagaccagttttgaaacactctttttgtagaatctgcaagaggatatttggatagctttgaggatttacttgggaaacgggaatgtcttcagataaactctagacagaagcattctcagaaacttctttgggatatttcaattgaagtcacagtgttgaacattccctttcacagagcaggtttgaaacactctttttgtagtgtctataagtgaacatttggcgtgctttcaggcctaacgtgaaaaaggaaatatcttcccataaaaactagacagaagcattctcagaaacttgttcgtgatgtgtgccctctactgacagagttgaacctttctttgcaaagagcagctttgaaacactctttttgtagaatctgcaagaggatatttggatagcttgtaggatttcgttggaaacgggtatgtcttcagataaactctagacagaagcattctcagaaacttctttgggatgttgcattcaagtcacagagtagaacattcccattcatagagcagatttgaaacactctttttgtagtatctggaagtggacatttggagcgctttcaggcctatgttgaaaaaggaaatatcttcccataaaaactagacggaagcattctcagaaacttatttgtgatgtgtttgctcaacaaacaggattgaaccatcgttttgaaggagcagttttgaaacactgttttcgtggaatctgcaagtggatatttggctagctttgaggatttcgttggaaacgggattacatataaaaaggagacagcaagcattctcagaaacttctttgtgatgtgtgcattcaagtcacagagttgaacattccctttcatagagcaggtttgaaacactctttttgtagtatctggatgtggacatttggatcgctttcaggcctatggtgaaaaaggaaatatcttcccatgaaaactagacagaagcattctcagaaacttatttgtgatgtgtgccctcaactgacagtgttgaacctttgttttgatagagcagttctgaaacacactttttgtaaaatctgcaagaggatatttggatagctttgaggatttcgttggaaacgggaatgtcttcatgtaaactctggacagaagcattctcagaaactgctttgggatgtttcaattgaagtcccagtgttgaacattccctttcatagagcaggtttgaaacactctttttgtactatctggaagtggacatttggagcgctttcaggtctacggtgaaaaaggagatatcttccaataaaaactagatagaagcaatgtcagaacttttttcatgatgtatctactcagcaaacagagttgaacctttcttttgagggagcagttttgaaacactatttttgtggaatatgcaagtgggtattaggccagcttggaggatttcgttggaaacgggaatacgtataaaaagcagacagcagcattgtcagaatctactttgtgatgtttgcattcaagtcacagaattgaacactccctttcacagagcaggtttgaaacactctttttgtagtgtctgtaagtgaacatttggattgctttcaggcctaaggtgaaaaaggaaatatcttcccataaaaactagacagaagcattctcagaaacttgtttgtgatgtgtgccctctactgacagagttgaacctttctttgcaaagagcagttttgaaacactctttttgtagaatctgcaagaggatatttggatagctttgaggatttcttgggaaacgggaatgtcttcagataaactctagacagaagcattctcagaaacttctttgggatgtttcaattgaagtcacagttttgaacattccctttcacagagcaggtttgaaacactctctttgtagtgtctataagtgaacatttggcgtgctttcaggcctaacgtgaaaaaggaaatatcttcccataaaaactagacagaagcattctcagaaacttgttcgtgatgtgtgccctctacagacagagttgaacctttctttgcaaagagcagctttgaaacactctttttgtagaatctgcaagaggatatttggatagcttggaggatttcgttggaaacgggtatgtcttcagataaactctagacagaagcattctcagaaacttctttgggatgttgcattcaagtcacagagtagaacattcccattcatagagcagatttgaaacactctttttgtagtatctggaagtggacatttggagcgctttcaggcctatgttgaaaaaggaaatatcttcccataaaaactagacggaagcattctcagaaacttatttctgatgtgtttgctcaactaacagaattgaaccatcgttttgaaggagcagttttgaaaccctgttttcgtggaatctgcaagtggatatttggctagctttgaggatttcgttggaaacgggattacctataaaaaggagacagcagcattctcagaaacttctttgtgatgtctgcattcaattcacagagttgagcattccctttcatagagcacgttggaaacactctttttgtagtatctggatgaggacatttggagcgctttcaggcctatggtgaaaaaggaaatatcttcccgtaaaaactagacagaagcattctcagaagtttatttgtgatgtgtgccctcaactaacagagttgaacctttcttttgatagagcagttttgaaacactctttttgtaaaatctgcaagaggatatttggatagctttgaggatttcgttgcaaacgggaatggcttcatataaactctagacagaagcattctcagaaacttcgttgggatgtttcgattgaagtcccagtgttgaacattcccttttatagagcaggttggaaacactctttctgcattccctggaagtggacatttggagcgctttcaggacgacggtgaaaatggaaatatcttccaagaaaatctagatagaagcaatgtcagaaacttttatgtgatggatctactcagctaacagagttgaacctttcttttgagagagcagttttgcaacactctttttgtggaatatgcaagtggatattagggcagctttgaggatttcgttggaaacgggaatacatgtaaaaagcagacagcagcattctcagaaacttctttgtgatgtttgcattgaagtcacagagttgaacattccctttgagagagcaggtttgaaacacgccttttgtcatatctggaagtgtccattcggagcgcattcaggcttgtgttggaaaaggaaatatcctcccataaaaactagacagaagcattctcagaaacttatctgtgatgtatgtactcaactaacagaactaaaccatcgttttgaaggagcagttttgaaacactctttttgcggaatctgcaagtggatatttggctagctgggaggatttcgttggaaacgggattacatacaaaaagcagacagcagcattctcagaaacttctttgtgatgtttgcattcaagtcgcagagttgaacattccctttcatagagcaggtttgaaacactctttttgtagtatctggatgtggacatttggatcgctttcaggcctatggtgaaaaaggaaatatcttcccatgaaaactagacagaagcattctcagaaacttatttgtgatgtgtgccctcaactgacagtgttgaacctttgttttgatagagcagttctgaaacacactttttgtaaaatctgcaagaggatatttggatagctttgaggatttcgttggaaacgggaatgtcttcatgtaaactctagacagaagcattctcagaaactgctttgggatgtttcaattgaagtcccagtgttgaacattccctttcatagagcaggtttgaaacattctttttgtactatctggaagtggacatttagagcgctttcaggtctacggtgaaaaaggagatatcttccaataaaaactagatagaagcaatgtcagaacttttttcatgatgtatctactcagcaaacagagttgaacctttcttttgagagagcagttttgaaacactctttttgtggaatatgcaagtgggtattaggccagcttggaggatttcgttggaaacgggaatacgtataaaaagcagacagcagcattgtcagaaactactttgtgatgtttgcattcaagtcacagaattgaacactccctttcagagagcaggtttgaaacactctttttgtagtgtctgtaagtgaacatttggattgctttcaggcctaaggtgaaaaaggaaatatcttcccataaaaactagacagaagcattctcagaaacttgtttgtgatgtgtgccctctactgacagagttgaacctttctttgcaaagagcagttttgaaacactctttttgtagaatctgcaagaggatatttggatagctttgaggatttcttgggaaacgggaatgtcttcagataaactctagacagaagcattctcagaaacttctttgggatgtttcaattgaagtcacagtgttgaacattccctttcacagagcaggtttgaaacactctttttgtagtgtctataagtgaacatttggcgtgatttcaggcctaacgtgaaaaaggaaatatcttcccataaaaactagacagaagcattctcagaaacttgtttgtgatgtgtgccctctactgacagagttgaacctttctttgcaaagagcagctttgaaacactctttttgtaggatctgcaagaggatatttggatagctttgaggatttcgttggaaacgggtatgtcttcagataaactctagacagaagcattctcagaaacttctttgggatgttgcattcaagtcacagagtagaacattcccattcatagagcagatttgaaacactctttttgtagtatctggaagtggacatttggagcgctttcaggcatatgttgaaaaaggaaatatcttcccataaaaactagacggaagcattctcagaaacttatttctgatgtgtttgctcaactaacagaattgaaccatcgttttgaaggagcagttttgaaatactgttttcgtggaatctgcaagtggatatttggctagctttgaggatttcgttggaaacgggattacctataaaaaggagacagcagcattctcagtaaacttctttgtgatgtttgcattcaagtcacagagttgaacattccctttcatagagcaggtttgaaacactctttttgtagtatctggatgtggacatttggattgctttcaggcctatggtgaaaaaggaaatttcttcccatgaaaactagacagaagcattctcagaaacttgtttgtgatgtgtgccctcaactgacagtgttgaacctttgttttgatagagcagttctgaaacacactttttgtaaaatctgcaagaggatatttggatagctttgaggatttcgttggaaacggaaatgtcttcatgtaaactctacacagaagcattctcagaaactgctttgggatgtttcaattgaagtcccagtgttgaacattcccattcatagagcaggtttgaaacactctttttgtactatctggaagtggacatttggagcgctttcaggtctacggtgaaaaaggagatatcttccaataaaaactagatagaagcaatgtcagaactttttccatgatgtatctactcagcaaacagagttgaacctttcttttgagagagcagttttgaaacactctttttgtggaatatgcaagtgggtattaggccagcttggaggatttcgttggaaacgggaatacgtataaaaagcagacagcagcattgtcagaaactactttgtgatgtttgcattcaagtcacagaattgaacactccctttcacagagcaggtttgaaacactctttttgtagtgtctgtaagtgaacatttggattgctttcaggcctaaggtgaaaaaggaaatatcttcccataaaaactagacagaagcattctcagaaacttgtttgtgatgtgtgtcctctactgacagagttgaacctttctttgcaaagagcagttttgaaacactctttttgtagaatctgcaagaggatatttggatagctttgaggatttcttgggaaacgggaatgtcttcagataaactctagacagaagcattctcagaaacttctttgggatgtttcaattgaagtcacagtgttgaacattccctttcacagagcaggtttgaaacactctttttgtagtgtctataattgaacatttggcgtgctttcaggcctaacgtgaaaaaggaaatatcttcccataaaaactagacagaagcattctcagaaacttgttcgtgatgtgtgccctctactgacagagttgaacctttctttgcaaagagcagctttgaaacactctttttgtagaatctgcaagaggatatgtggatagatttgaggatttcgttggaaacgggtatgtcttcagataagctctagacagaagcattctcagaaacttctttgggatgtttcaattgaagtcacagtgttgaacattccctttcacagagcaggtttgaaacactctttttgtagtgtctataagtgaacatttggcgtgctttcaggcctaacgtgaaaaaggaaatatcttcccataaaaactagacagaagcattctcagaaacttgtttgtgatgtgtgccctctactgacagagttgaacctttctttgcaaagagcagctttgaaacactctttttgtagaatctgcaagaggatatttggatagctttgaggatttcgttggaaacgggtatgtcttcagataaactctagacagaagcattctcagaaacttctttgggatgttgcattcaagtcacagagtagaacattccctttcatagagcagatttgaaacactctttgtgtagtatctggaagtggacatttggagcgctttcaggcctatgttgaaaaaggaaatatcttcccataaaaactagacggaagcattctcagaaacttacttgtgatgtgtttgctcaactaacagaattgaaccatcgttttgaaggagcagttttgaaacactgttttcgtggaatctgcaagtggatatttggctagctttgaggatttcgttggaaacgggattacatataaaaaggagacagcagcattctcagaaacttctttgtgatgtctgcattcaagtcacagagttgagcattccctttcatagagcaggttggaaacactctttttgtagtatctgtatgaggacatttggagcgctttcaggcgtatggtgaaaaaggaaatatcttcccgtaaaaactagacagaagattctcagaaatttatttgtgatgtgtgccctcaactaacagagttgaacctttcttttgatagagcagttttgaaacactctttttgtaaaatctgcaagaggatatttggatagctttgaggatttcgttgcaaacgggaatggcttcatataaactctagacagaagcattctcagaaacttcgttgggatgtttcgattgaagtcccagtgttgaacattcccttttatagagcaggttggaaacactctttctgcattccctggaagtggacatttggagcgctttcaggacgacggtgaaaatggaaatatcttccaagaaaatctagatagaagcaatgtcagaaacttttctgtgatggatctactcagctaacagagttgaacctttcttttgagagagcagttttgcaacactctttttgtggaatatgcaagtggatattagggcagctttgaggttttcgttggaaacgggaatacatgtaaaaagcagacagcagcattctcagaaaacttctttgtgatgtttgcattgaagtcacagagttgaacattccctttgagagagcaggtttgaaacacgccttttgtcatatctggaagtgtccattcggagcgcattcaggcttgtgttgaaaaaggaaatatcctcccagaaaaactagacagaagcattctcagaaacttatctgtgatgtatgtactcaactaacagaactaaaccatcgttttgaaggagcagttttgaaacactctttttgcggaatctgcaagtggatatttggctagctgggaggatttcgttggaaacgggattacatacaaaaagcagacagcagcattctcagaaacttctttgtgatgtttgcattcaagtcacagagttgaacattccctttcatagagcaggtttgaaacactctttttgtagtatctggatgtggacatttggatcgctttcaggcctatggtgaaaaaggaaatatcttcccatgaaaactagacagaagcattctcagaaacttatttgtgaggtgtgccctcaactgacagtgttgaacctttgttttgatagagcagttctgaaacacaccttttgtaaaatctgcaagaggatatttggatagctttgaggatttcgttggaaacgggaatgtcttcatgtaaactctagacagaagcattctcagaaactgctttgggatgtttcaattgaagtcccagtgttgaacattccctttcatagagcaggtttgaaacactctttttgtactatctggaagtggacatttggagcgctttcaggtctacggtgaaaaaggagatatcttccaataaaaactagatagaagcaatgtcagaacttttttcatgatgtatctactcagcaaacagagttgaacctttcttttgagagagccgttttgaaacactctttttgtggaatatgcaagtgggtattaggccagcttggaggatttcgttggaaacgggaatacgtataaaaatcagacagcagcattgtcagaaactactttgtgatgtttgcattcaagtcacagaattgaacactccctttcacagagcaggtttgaaacactctttttgtagtgtctgtaagtgaacatttggattgctttcaggcctaaggtgaaaaaggaaatatcttcccataaaaactagacagaagcattctcagaaacttgtttgtgatgtgtgccctctactgacagagttgaacctttctttgcaaagagcagttttgaaacactctttttgtagaatctgcaagaggatatttggatagctttgaggatttcttgggaaacgggaatgtcttcagataaactctagacagaagcattctcagaaacttcttgggatatttcaattaaagtcacagtgttgaacattccctttcacagagcaggtttgaaacactctttttgtagtgtttataagtgaacatttggcgtgctttcaggcctaacgtgaaaaaggaaatatcttcccataaaaactagacagaagcattctcagaaacttgttcgtgatgtgtgccctctactgacagagttgaacctttctttgcaaagagcagctttgaaacactctttttgtagaatctgcaagaggatatttggatagctttgaggatttcgttggaaacgggtatgtcttcagataaactctagacagaagcattctcagaaacttctttgggatgttgcattcaagtcacagagtagaacattcccattcatagagcagatttgaaacactctttttgtagtatctggaagtggacatttggagcgctttcaggcctatgttgaaaaaggaaatatcttcccataaaaactagacggaagcattctcagaaacttacttgtgatgtgtttgctcaactaacagaattgaaccatcgttttgaaggagcagttttgaaacactgttttcgtggaatctgcaagtggatatttggctagctttgaggatttcgttggaaacgggattacatataaaaaggagacagcagcattctcagaaacttctttgtgatgtctgcattcaagtcacagagttgagcattccctttcatagagaaggttggaaacactctttttgtagtatctggatgaggacatttggagcgctttcaggcgtatggtgaaaaaggaaatatcttcccgtaaaaactagacagaagcattctcagaaatttatttgtgatgtgtgccctcaactaacagagttgaacctttcttttgatagagcagttttgaaacactctttttgtaaaatctgcaagaggatatttggatagctttgaggatttcgttgcaaacgggaatggcttcatataaactctagacagaagcattctcagaaacttcgttgggatgtttcgattgaagtcccagtgttgaacattcccttttatagagcaggttggaaacactctttctgcattccctggaagtggacaattggagcgctttcaggacgacggtgaaaatggaaatatcttccaataaaatctggatagaagcaacgtcagaaacttttctgtgatggatctactcagctaacagagttgaacctttcttttgagagagcagttttgcaacactctttttgtggaatatgcaagtggatattagggcagctttgaggatttcgttggaaacgggaatacatgtaaaaagcagacagcagcattctcagaaacttctttgtgatcttttcattgaagtcacagagttgaacattccctttgagagagcaggtttgaaacacgccttttgtcatatctggaagtgtccattcggagcgcattcaggcttgtgttgaagaaggaaatatcctcccataaaaactagacagaagcattctcagaaactcatttgtgatgtatgtactcaactaacagaactaaaccatcgttttgaaggagcagttttgaaacaccctttttgcggaatctgcaactggatatttggctagcttggaggatttcgttggaaacgggattacatacaaaaagcagacagcaagcattctcagtaaacttatttgtgatgtgtgccctcaactgacagtgttgaacctttgttttgatagagcagttctgaaacacactttttgtaaaatctgcaagaggatatttggatagctttgaggatttcgttggaaacgggaatgtcttcatgtaaactctagacagaagcattctcagaaactgctttgggatgtttcaattgaagtcccagtgttgaacattccctttcatagagcaggtttgaaacactctttttgtactatctggaagtggacatttggagcgctttcaggtctacggtgaaaaaggagatatcttccaataaaaactagatagaagcaatgtcagaacttttttcatgatgtatctactcagcaaacagagttgaacctttcttttgagagagcagttttgaaacactctttttgtggaatatgcaagtgggtattaggccagcatggaggatttcgttggaaacgggaatacgtataaaaagtagacagcagcattgtcagaaactactttgtgatgtttgcattcaagtcacagaattgaacactccctttcacagagcaggtttgaaacactctttttgtagtgtctgtaagtgaacatatggattgctttcaggcctaaggtgaaaaaggaaatatcttcccataaaaactagacagaaagcattctcagaaacttgtttgtgatgtgtgccctctactgacagagttgaacctttctttgcaaagagcagttttgaaacactctttttgtagaatctgcaagaggatatttggatagctttgaggatttcttgggaaacgggaatgtcttcagataaactctagacagaagcattctcagaaacttctttgggatatttcaattgaagtcacagtgttgaacattccctttcacagagcaggtttgaaacactctttttgtagtgtctataagtgaacatttggcgtgctttcaggcctaacgtgaaaaaggaaatatcttcccataaaaactagacagaagcattctcagaaacttgttcgtgatgtgtgccctctactgacagagttgaacctttctttgcaaagagtagctttgaaacactctttttgtagaatctgcaagaggatatttggatagctttgaggatttcgttggaaacgggtatgtcttcagataaactctagacagaagcattctcagaaacttctttgggatgttgcattcaagtcacagagtagaacattcccattcatagagcagatttgaaacactctttttgtagtatctggaagtggacatttggagcgctttcaggcctatgttgaaaaaggaaataccttcccataaaaactagacggaagcattctcagaaacttacttgtgatgtgtttgctcaactaacagaattgaaccatcgttttgaaggagcagttttgaaacactgttttcgtggaatctgcaagtggatatttggctagctttgaggatttcgttggaaacgggattacatataaaaaggagacagcagcattctcagaaacttctttgtgatgtctgcattcaagtcacagagttgagcattccctttcatagagcaggttggaaacactctttgtgtagtatctggatgaggacatttggagcgctttcaggcgtatggtgaaaaaggaaatatcttcccgtaaaaactagacagaagcattctcagaagtttatttgtgatgtgtgccctcaactaacagagttgaacctttcttttgatagagcagttttgaaacactctttttgtaaaatctgcaagaggatatttggatagctttgaggatttcgttgcaaacgggaatggcttcatataaactctagacagaagcattctcagaaacttcgttgggatgtttcgattgaagtcccagtgttgaacattcccttttatagagcaggttggaaacactctttctgcattccctggaagtggacatttggagcgctttcaggacgacggtgaaaatggaaatatcttccaagaaaatctagatagaagcaacgtcagaaacttttctgtgatggatctactcagctaacagagttgaacctttcttttgagagagcagttttgcaacactctttttgtggaatatgcaagtggatattagggcagctttgaggatttcgttggaaacgggaatacatgtaaaaagcagacagcagcattctcagaaacttctttgtgatgtttgcattgaagtcacagagttgaacattccctttgagagagcaggtttgaaacacgccttttgtcatatctggaagtgtccattcggagcgcattcaggcttgtgttgaaaaaggaaatatcctcccataaaaactagacagaagcattctcagaaacttatctgtgatgtatgtactcaactaacagaactaaaccatcgttttgaaggagcagttttgaaacactctttttgcggaatctgcaagtggatatttggctagctgggaggatttcgttggaaacgggattacatacaaaaagcagacagcagcattctcagaaacttctttgtgatgtttgcattcaagtcacagagttgagcattccctttcatagagcaggtttgaaacactctttttgtagtatctggatgtggacatttggatcgctttcaggcctatggtgaaaaaggaaatatcttcccatgaaaactagacagaagcattctcagaagtttatttgtgatgtgtgccctcaactaacagagttgaacctttcttttgatagagcagttttgaaacactcattttgtaaaatctgcaagaggatatttggatagctttgaggatttcgttgcaaacgggaatggcttcatataaactctagacagaagcattctcagaaacttcgtcgggatgtttcgattgaagtcccagtgttgaacattcccttttatagagcaggttggaaacactctttctgcattccctggaagtggacaattggagcgctttcaggacgacggtgaaaatggaaatatcttccaataaaatctggatagaagcaacgtcagaaacttttatgtgatggatctactcagctaacagagttgaacctttcttttgagagagcagttttgcaacactctttttgtggaatatgcaagtggatattagggcagctttgaggatttcgttggaaacgggaatacatgtaaaaagcagacagcagcattctcagaaacttctttgtgatgtttgcattgaagtcacagagttgaacattccctttgagagagcaggtttgaaacacgccttttgtcatatctggaagtgtccattcggagcgcattcaggcttgtgttgaaaaaggaaatatcctcccataaaaactagacagaaagcattctcagaaacttatctgtgatgtatgtactcaactaacagaactaaaccatcgttttgaaggagcagttttgaaacactctttttgcggaatctgcaagtggatatttggctagctgggaggatttcgttggaaacgggattacatacaaaaagcagagagcagcattctcagaaacttctttgtgatgtttgcattcaagtcacagagttgaacattccctttcatagagcaggtttgaaacactctttttgtagtatctggatgtggacatttggatcgctttcaggcctatggtgaaaaaggaaatatcttcccatgaaaactagacagaagcattctcagaaacttatttgtgatgtgtgccctcaactgacagtgttgaacctttgttttgatagagcagttctgaaacacactttttgtaaaatctgcaagaggatatttggatagctttgaggatttcgttggaaacgggaatgtcttcatgtaaactctagacagaagcattctcagaaactgctttgggatgtttcaattgaagtcccagtgttgaacattccctttcatagagcaggtttgaaacactctttttgtactatctggaagtggacatttagagcgctttcaggtctacggtgaaaaaggagatatcttccaataaaaactagatagaagcaatgtcagaacttttttcatgatgtatctactcagcaaacagagttgaacctttcttttgagagagcagttttgaaacactctttttgtggaatatgcaagtgggtattaggccagcttggaggatttcgttggaaacgggaatacgtataaaaagcagacagcagcattgtcagaaactactttgtgatgtttgcattcaagtcacagaattgaacactccctttcacagagcaggtttgaaacactctttttgtagtgtctgtaagtgaacatatggattgctttcaggcctaaggtgaaaaaggaaatatcttcccataaaaactagacagaagcactctcagaaacttgtttgtgatgtgtgccctctactgacagagttgaacctttctttgcaaagagcagttttgaaacactccttttgtagaatctgcaagaggatatttggatagctttgaggatttcttgggaaacgggaatgtcttcagataaactctagacagaagcattctcagaaacttctttgggatatttcaattgaagtcacagtgttgaacattccctttcacagagcaggtttgaaacactctttttgtagtgtctataagtgaacatttggcgtgctttcaggcctaacgtgaaaaaggaaatatcttcccataaaaactagacagaagcattctcagaaacttgttcgtgatgtgtgccctctactgacagagttgaacctttctttgcaaagagcagctttgaaacacactttttgtagaatctgcaagaggatatttggatagcttggaggatttcgttggaaacgggtatgtcttcagataaactctagacagaagcattctcagaaacttctttgggatgttgcattcaagtcacagagtagaacattcccattcatagagcagatttgaaacactctttttgtagtatctggaagtggacatttggagcgctttcaggcctatgttgaaaaaggaaatatcttcccataaaaactagacggaagcattctcagaaacttatttgtgatgtgtttgctcaactaacaggattgaaccatcgttttgaaggagcagttttgaaacactgttttcgtggaatctgcaagtggatatttggctagctttgaggatttcgttggaaacgggattacatataaaaaggagacagcagcattctcagaaacttctttgtgatgtctgcattcaattcacagagttgagcattccctttcatagagcaggttggaaacactctttttgtagtatgtggatgaggacatttggagcgctttcaggcctatggtgaaaaaggaaatatcttcccgtaaaaactagacagaagcattctcagaagtttatttgtgatgtgtgccctcaactaacagagttgaacctttcttttgatagagcagttttgaaacactctttttgtaaaatctgcaagaggatatttggatagctttgaggatttcgttgcaaacgagaatggcttcacataaactctagacagaagcattctcagaaacttcgttgggatgtttcgattgaagtcccagtgttgaacattcccttttatagagcaggttggaaacactctttctgcattccctggaagtggacatttggagcgctttcaggacgacggtgaaaatggaaatatcttccaagaaaatctagatagaagcaatgtcagaaacttttctgtgatggatctactcagctaacagagttgaaactttcttttgagagagcagttttgcaacactctttttgtggaatatgcaagtggatattagggcagctttgaggatttcgttggaaacgggaatacatgtaaaaagcagacagcagcattctcagaaacttctttgtgatgtttgcattgaagtcacagagttgaacattccctttgagagagcaggtttgaaacacgccttttgtcatatctggaagtgtccattcggagcgcattcaggcttgtgttgaaaaaggaaatatcctcccataaaaactagacagaagcattctcagaaacttatctgtgatgtatgtactcaactaacagaactaaaccatcgttttgaaggagcagttttgaaacactctttttgcggaatctgcaagtggatatttggctagctgggaggatttcgttggaaacgggattacatacaaaaagcagagagcagcattctcagaaacttattggtgatgtgtgccctcaactgacagtgttgaacctttgttttgatagagcagttctgaaacacactttttgtaaaatctgcaagaggatatttggatagctttgaggatttcgttggaaacgggaatgtcttcatgtaaactctacacagaagcattctcagaaactgctttgggatgtttcaattgaagtcccagtgttgaacattccctttcatagagcaggtttgaaacactctttttgtactatctggaagtggacatttggagcgctttcaggtctacggtgaaaaaggagatatcttccaataaaaactagatagaagcaatgtcagaacttttttcatgatgtatctactcagcaaacagagttgaacctttcttttgagagagcagttttgaaacactctttttgtggaatatgcaagtgggtattaggccagcttggaggatttcgttggaaacgggaatacgtataaaaagaagacagcagcattgtcagaaactactttgtgatgtttgcattcaagtcacagaattgaacactccctttcacagagcaggtttgaaacactctttttgtagtgtctgtaagtgaacatttggattgcttcaggcctaaggtgaaaaaggaaatatcttcccataaaaactagacagaagcattctcagaaacttgtttgtgatgtgtgccctctactgacagagttaaacctttctttgcaaagagcagttttgaaacactctttttgtagaatctgcaagaggatatttggatagctttgaggatttcctgggaaacgggaatgtcttcagataaactctagacagaagcattctcagaaacttctttgggatgtttcaattgaagtcacagtgttgaacattccctttcacaggagcaggtttgaaacactctttttgtagtgtctataagtgaacatttggcgtgctttcaggcctaacgtgaaaaaggaaatatcttcccataaaaactagacagaagcattctcagaaacttgttcttgatgtgtcccctctactgacagagttgaacctttctttgcaaagagcagctttgaaacactctttttgtagaatctgcaagaggatatttggatagcttggaggatttcgttggaaacgggtatgtcttcagataaactctagacagaagcattctcagaaacttctttgggatgttgcattcaagtcacagagtagaacattcccattcatagagcagatttgaaacactctttttgtagtatctggaagtggacatttggagcgctttcaggcctatgttgaaaaaggaaatatcttcccataaaaactagacggaagcattctcagaaacttatttgtgatgtgtttgctcaactaacaggattgaaccatcgttttgaaggagcagttttgaaacactgttttcgtggaatctgcaagtggatatttggctagctttgaggatttcgttggaaacgggattacatataaaaaggagacagcagcattctcagaaacttctttgtgatgtctgcattcaattcacagagttgagcattccctttcatagagcaagttggaaacactctttttgtagtatctggatgaggacatttggagcgctttcaggcatatggtgaaaaaggaaatatcttcccgtaaaaactagacagaagcattctcagaagtttatttgtgatgtgtgccctcaactaacagagttgaacctttcttttgatagagcagttttgaaacactctttttgtaaaatctgcaagaggatatttggatagctttgaggatttcgttgcaaacgggaatggcttcatataaactctagacagaagcattctcagaaacttcgttgggatgtttcgattgaagtcccagtgttgaacattcccttttatagagcaggttggaaacactctttctgcattccctggaagtggacatttggagcgctttcaggacgacggtgaaaatggaaatatcttccaagaaaatctagatagaagcaacgtcagaaacttttctgtgatggatctactcagctaacagagttgaacctttcttttgagagagcagttttgcaacactctttttgtggaatatgcaagtggatattagggcagctttgaggatttcgttggaaacgggaatacatgtaaaaagcagacagcagcattctcagaaacttctttgtgatgtttacattgaagtcacagagttgaacattccctttgagagagcaggtttgaaacacgccttttgtcatatctggaagtgtccattcggagcgcattcaggcttgtgttgaaaaaggaaatatcctcccagaaaaactagacagaagcattctcagaaacttatctgtgatgtatgtactcaactaacagaactaaaccatcgttttgaaggagcagttttgaaacactctttttgcggaatctgcaagtggatatttggctagctgggaggatttcgttggaaacgggattacatacaaaaagcagacagcagcattctcagaaacttctttgtgatgtttgcattcaagtcacagagttgaacattccctttcatagagcaggtttgaaacactctttttgtagtatctggatgtggacatttggatcgctttcaggcctatggtgaaaaaggaaatatcttcccatgaaaactagacagaagcattctcagaaacttatttgtgatgtgtgccctcaactgacagtgttgaacctttgttttgatagagcagttctgaaacacactttttgtaaaatctgcaagaggatatttggatagctttgaggatttcgttggaaacgggaatgtcttcatgtaaactctagacagaagcattctcagaaactgctttgggatgtttcaattgaagtcccagtgttgaacattccctttcatagagcaggtttgaaacactctttttgtagtatctggatgaggacatttggagcgctttcaggcgtatggtgaaaaaggaaatatcttcccgtgaaaactagatagaagcattctcagaagtttatttctgatgtgtgccctcaactaacagagttgaacctttcttttgatagagcagttttgaaacactctttttgtaaaatctgcaagatgatatttggatagctttgaggatttcgttgcaaacgggaatggcttcatataaactctagacagaagcattctcagaaacttcgttgggatgtttcgattgaagtcccagtgttgaacattcccattcatagagcaggtttgaaacactctttttgtactatctggaagtggacatttggagcgctttcaggtctacggtgaaaaaggagatatcttccaataaaaactagatagaagcaatgtcagaacttttttcatgatgtatctactcagcaaacagagttgaacctttcttttgagagagcagttttgaaacactctttttgtggaatatgcaagtgggtattaggccagcttggaggatttccttggaaacgggaatacgtataaaaagcagacagcagcattgtcagaaactactttgtgatatttgcattcaagtcacagaattgaacactccctttcacagagcaggtttgaaacactctttttgtagtgtctgtaagtgaacatttggattgctttcaggcctaaggtgaaaaaggaaatatcttcccataaaaactagacagaagcattctcagaaacttgtttgtgatgtgtgccctctactgacagagttgaacctttctttgcaaagagcagttttgaaacactctttttgtagaatctgcaagaggatatttggatagctttgaggatttcttgggaaacgggaatgtcttcagataaactctagacagaagcattctcagaaacttctttgggatatttcaattgaagtcacagtgttgaacattccctttcacagagcaggtttgaaacactctttttgtagtgtctataagtgaacatttgtcgtgctttcaggcctaaggtgaaaaaggaaatatcttcccataaaaactagacagaagcattctcagaaacttgttcgtgatgtgtgccctctactgacagagttgaacctttctttgcaaagagcagctttgaaacactctttttgtagaatctgcaagaggatatttggatagctttgaggatttcgttggaaacgggtatgtcttcagataaactctagacagaagcattctcagaaacttctttgggatgttgcattcaagtcacagagtagaacattcccattcatagagcagatttgaaacactctttttgtagtatctggaagtggacatttggagcgctttcaggcctatgttgaaaaaggaaatatcttcccataaaaactagacggaagcattctcagaaacttacttgtgactgtgtttgctcaactaacagaattgaaccatcgttttgaaggagcagttttgaaacactgttttcgtggaatctgcaagtggatatttggctagctttgaggatttcgttggaaacgggattacatataaaaaggagacagcagcattctcagaaacttctttgtgatgtctgcattcaagtcacagagttgagcattccctttcatagcagcaggttggaaacactctttttgtagtatctggatgaggacatttggagcgctttcaggcgtatggtgaaaaaggaaatatcttcccgtaaaaactagacagaagcattctcagaagtttatttgtgatgtgtgccctcaactaacagagttgaacctttcttttgatagagcagttttgaaacactctttttgtaaaatctgcaagaggatatttggatagctttgaggatttcgttgcaaacgggaatggcttcatataaactctagacagaaagcattctcagaaacttcgttgggatgtttcgattgaagtcccagtgttgaacattcccttttatagagcaggttggaaacactctttctgcattccctggaagtggacatttggagcgctttcaggacgacggtgaaaatggaaatatcttccaagaaaatctagatagaagcaacgtcagaaacttttatgtgatggatctactcagctaacagagttgaacctttcttttgagagagcagttttgcaacactctttttgtggaatatgcaagtggatattagggcagctttgaggatttcgttggaaacgggaatacatgtaaaaagcagacagcagcattctcagaaacttctttgtgatgtttgcattgaagtcacagagttgaacattccctttgagagagcaggtttgaaacacgccttttgtcatatctggaagtgtccattcggagcgcattcaggcttgtgttgaaaaaggaaatatcctcccataaaaactagacagaagcattctcagaaacttatttgtgatgtatgtactcaactaacagaactaaaccatcgttttgaaggagcagttttgaaacactctttttgcggaatctgcaactggatatttggctagcttggaggatttcgttggaaacgggattacatacaaaaagcagacagcagcattctcagaaacttatttgtgatgtgtgccctcaactgacagtgttgaacctttgttttgatagagcagttctgaaacacactttttgtaaaatctgcaagaggatatttggatagctttgaggatttcgttggaaacgggaatgtcttcatgtaaactctagacagaagcattctcagaaactgctttgggatgtttcaattgaagtcccagtgttgaacattccctttcatagagcaggtttgaaacactctttttgtactatctggaagtggacatttggagcgctttcaggtctacggtgaaaaaggagatatcttccaataaaaactagatagaagcaatgtcagaacttttttcatgatgtatctactcagcaaacagagttgaaccttacttttgagagagcagttttgaaacactctttttgtggaatatgcaagtgggtattaggccagcttggaggatttcgttggaaacgggaatacgtataaaaagcagacagcagcattgtcagaaactactttgtgatgtttgcattcaagtcacagaattgaacactccctttcacagagcaggtttgaaacactctttttgtagtgtctgtaagtgaacatttggattgctttcaggcctaaggtgaaaaaggaaatatcttcccataaaaactagacagaagcattctcagaaacttgtttgtgatatgtgccctctactgacagagttgaacctttctttgcaaagagcagttttgaaacactctttttgtagaatctgcaagaggatatttggatagctttgaggatttcttgggaaacgggaatgtcttcagataaactctagacagaagcattctcagaaacttctttgggatgtttcaattgaagtcacagtgttgaacattccctttcacagagcaggtttgaaacactctttttgtagtgtctataagtgaacatttggcgtgctttcaggcctaacgtgaaaaaggaaatatcttcccataaaaactagacagaagcattctcagaaacttgttcttgatgtgtcccctctactgacagagttgaacctttctttgcaaagagcagctttgaaacactctttttgtagaatctgcaagaggatatttggatagcttggaggatttcgttggaaacgggtatgtcttcagataaactctagacagaagcattctcagaaacttctttgggatgttgcattcaagtcacagagtagaacattcccattcatagagcagatttgaaacactctttttgtagtatctggaagtggacatttggagcgctttcaggcctatgttgaaaaaggaaatatcttcccataaaaactagacggaagcattctcagagaccagtttgtgatgtgtgtactcaagtaacagagttgaaccattcttttgatagagcagttttgaaacactctttttgtagaatctgcaagtggatatttggatagctttgaggatttcgttggaaacgggaatatcttcatataaaatctagacagaagcattctcagaaacatctctgtgatgtttgcattcaagtcacagagttgaacattccctttcatagagcaggtttgaaacactctttttgtagtatctggaagtgcacatttggagcgcattgaggcctaaggtgaaaaaggaaatatcttcccataaaaactagacagaagcattctcagaaatttatttgtgatgtgtgccctcaaataacagagttgaacctttcttttgatagagcagttttgaaacactctttttgtaaaatctgcaagaggatatttggatagctttgaggatttctttgcaaacgggaatggcttcatataaactctagacagaagcattctcagaaatttctttgtgatgtttgcattcaggtcacagagttgaacattccctttcatagagcaggtttgaaacactctttttgtagtatctggaagtggacatttggagcgctttgtggcctatggtgaaaaaggaaatatcttcccataaaaaccagacagaagcattctcagaagtttatttgtgatgtgtgccctcaactaacagagttgaacctttcttttgatagagcagttttgaaacactctttttgtaaaatctgcaagaggatatttggatagctttgaggatttcgttgcaaacgggaatggcttcatataaactctagacagaagcattctcagaaacttcgttgggatgtttcgattgaagtcccagtgttgaacattcccttttatagagcaggttggaaacactctttctgcattccctggaagtggacatttggagcgctttcaggacgacggtgaaaatggaaatatcttccaagaaaatctagatagaagcaacgtcagaaacttttctgtgatggatctactcagctaacagagttgaacctttcttttgagagagcagttttgcaacactctttttgtggaatatgcaagtggatattagggcagctttgaggatttcgttggaaacgggaatacatgtaaaaagcagacagcagcattctcagaaacttctttgtgatgtttgcattgaagtcacagagttgaacattccctttgagagagcaggtttgaaacacgccttttgtcatatctggaagtgtccattcggagcgcattcaggcttgagttgaaaaaggaaatatcctcccataaaaactagacagaagcattctcagaaacttatctgtgatgtatgtactcaactaacagaactaaaccatcgttttgaaggagcagttttgaaacactctttttgcggaatctgcaagtggatatttggctagctgggaggatttcgttggaaacgggattacatacaaaaagcagacagcagcattctcagaaacttctttgtgatgtttgcattcaagtcaaagagttgaacattccctttcatagagcaggtttgaaacactctttttgtagtatctggatgtggacatttggatcgctttcaggcctatggtgaaaaaggaaatatcttcccatgaaaactagacagaagcattctcagaaatttatttgtgatgtgtgccctcaactaacagagttgaacctttcttttgatagagcagttttgaaacactctttttgtaaaatctgcaagaggatatttggatagctttgaggatttcgttgcaaacgggaatggcttcatataaactctagacagaagcattctcagaaacttcgttgggatgtttcgattgaagtcccagtgttgaacattcccttttatagagcaggttggaaacactctttctgcattccctggaagtggacatttggagcgctttcaggaggacggtgaaaatggaaatatcttccaagaaaatctagatagaagcaatgtcagaaacttttctgtgatggatctactcagctaacagagttgaacctttcttttgagagagcagttttgcaacactctttttgtggaatatgcaagtggatattagggcagctttgaggatttcgttggaaacgggaatacatgtaaaaagcagacagcagcattctcagaaacttctttgtgatgtttgcattgaagtcacagagttgaacattccctttgagagagcaggtttgaaacacgccttttgtcatatctggaagtgtccattcggagcgcattcaggcttgtgttggaaaaggaaatatcctcccataaaaactagacagaagcattctcagaaacttatctgtgatgtatgtactcaactaacagaactaaaccatcgttttgaaggagcagttttgaaacactctttgtgcggaatctgcaagtggatatttggctagctgggaggatttcgttggaaacgggattacatacaaaaagcagacagcagcattctcagaaacttatttgtgatgtgtgccctcaactgacagtgttgaacctttgttttgatagagcagttctgaaacacactttttgtaaaatctgcaagaggatatttgcatagctttgaggatttcgttggaaacgggaatgtcttcatgtaaactctagacagaagcattctcagaaactgctttgggatgtttcaattgaagtcccagtgttgaacattccctttcatagagcaggtttgaaacactctttttgtactatctggaagtggacatttggagcgctttcaggtctacggtgaaaaaggagatatcttccaataaaaactagatagaagcaatgtcagaacttttttcatgatgtatctactcagcaaacagagttgaacctttcttttgagagagcagttttgaaacactctttttgtggaatatgcaagtgggtattaggccagcttggaggatttcgttggaaacgggaatacgtataaaaagcagacagcagcattgtcagaaactactttgtgatgtttgcattcaagtcacagaattgaacactccctttcacagagcaggtttgaaacactctttttgtagtgtctgtaagtgaacatatggattgctttcaggcctaaggtgaaaaaggaaatatcttcccataaaaactagacagaagcattctcagaaacttgtttgtgatgtgtgccctctactgacagagttgaacctttctttgcaaagagcagttttgaaacactctttttgtagaatctgcaagaggatgtttggatagctttgaggatttcttgggaaacgggaatgtcttcagataaactctagacagaagcattctcagaaacttctttgggatgtttcaattgaagtcacagtgttgaacattccctttcacagagcaggtttgaaacactctttttgtagtgtctataagtgaacatttggcgtgctttcaggcctaacgtgaaaaaggaaatatcttcccataaaaactagacagaagcattctcagaaacttgttcttgatgtgtcccctctactgacagagttgaacctttctttgcaaagagcagctttgaaacactctttttgtagaatctgcaagaggatatttggatagcttggaggatttcgttggaaacgggtatgtcttcagataaactctagacagaagcattctcagaaacttctttgggatgttgcattcaagtcacagagtagaacattcccattcatagagcagatttgaaacactctttttgtagtatctggaagtggacatttggagcgctttcaggcctatgttgaaaaaggaaatatcttcccataaaaactagacggaagcattctcagaaacttatttgtgatgtgtttgctcaactaacaggattgaaccatcgttttgaaggagcagttttgaaacactgttttcgtggaatctgcaagtggatatttggctagctttgaggatttcgttggaaacgggattacatataaaaaggagacagcagcattctcagaaacttctttgtgatgtctgcattcaattcacagagttgagcattccctttcatagagcaggttggaaacactctttttgtagtatctggatgtggacatttggatcgctttcaggcctatggtgaaaaaggaaatatcttcccatgaaaactagacagaagcattctcagaaacttatttgtgatgtgtgcactcaactgacagtgttgaacctttgttttgatagagcagttctgaaacacactttttgtaaaatctgcaagaggatatttggatagctttgaggatttcgttggaaacgggaatgtcttcatgtaaactctagacagaagcattctcagaaactgctttgggatgtttcaattgaagtcccagtgttgaacattcccattcatagagcaggtttgaaacactctttttgtactatctggaagtggacatttggagcgctttcaggtctacggtgaaaaaggagatatcttccaataaaaactagatagaagcaatgtcagaaatttttccatgatgtatctactcagcaaacagagttgaacctttcttttgagagagcagttttgaaacactctttttgtggaatatgcaagtgggtattaggccagcttggaggatttcgttggaaacgggaatatgtataaaaagcagacagcagcattgtcagaaactactttgtgatgtttgcattcaagtcacagaattgaacactccctttcacagagcaggtttgaaacactctttttgtagtgtctgtaagtgaacatttggattgctttcaggcctaaggtgaaaaaggaaatatcttcccataaaaactagacagaagcattctcagaaacttgtttgtgatgtgtgccctctactgacagagttgaacctttctttgcaaagagcagttttgaaaccctctttttgtagaatctgcaagaggatatttggatagctttgaggatttcttgggaaacgggaatgtcttcagataaactctagacagaagcattctcagaaacttctttgggatgtttcaattgaagtcacagtgttgaacattccctttcacagagcaggtttgaaacactctttttgtagtgtctataagtgaacatttggcgtgctttcaggcgtaacgtgaaaaaggaaatatcttcccataaaaaccagacagaagcattctcagaaacttgttcgtgatgtgtgccctctactgacagagttgaacctttctttgcaaagagcagctttgaaacacactttttgtagaatctgcaagaggatatttggatagctttgaggatttcgttggaaacgggtatgtcttcagatatactctagacagaagcattctcagaaatttctttgggatgttgcatgcaagtcacagagtagaacattcccattcatagagcagatttgaaacactctttttgtagtatctggaagtggacatttggagcgctttcaggcctatgttgaaaaaggaaatatcttcccataaaaactagacggaagcattctcagaaacttaattgtgatgagtttgctcaactaacaggattgaaccatccttttgaaggagcagttttgaaacactgttttcgtggaatctgcaagtggatatttggctagctttgaggatttcgttggaaacgggattacatataaaaaggagacagcagcattctcagaaacttctttgtgatgtctgcatttaattcacagagttgagcattccctttcatagagcaggttggaaacactctttttgtagtatctggatgaggacatttggagcgctttcaggcgtatggtgaaaagggaaatatcttcccgtaaaaactagacagaagcattctcagaaatttatttgtgatgtgtgccctcaactaacagagttgaacctttcttttgatagagcagttttgaaacactctttttgttaaatctgcaagaggatatttggatagctttgaggatttcgttgcaaacggaaatggcttcatataaactctagacagaagcattctcagaaacttcgttgggatgttgcgattgaagtcccagtgttgaacattcccttttatagagcaggttggaaacactctttctgcattccctggaagtggacatttggagcgctttcaggacgacggtgaaaatggaaatatcttccaagaaaatctagatagaagcaacgtcagaaacttttatgtgatggatctactcagctaacagagttgaacctttcttttgagagagcagttttgcaacactctttttgtggaatatgcaagtggatattagggcagctttgaggatttcgttggaaacgggaatacatgtaaaaagcagacagcagcattctcagaaacttctttgtgatgtttgcattgaagtcacagagttgaacattccctttgagagagcaggtttgaaacacgccttttgtcatatctggaagtgtccattcggagcgcattcaggcttgtgttgaaaaaggaaatatcctcccataaaaactagacagaagcattctcagaaacttatctgtgatgtatgtactcaactaacagaactaaaccatcgttttgaaggagcagttttgaaacactctttttgcggaatctgcaagtggatatttggctagctgggaggatttcgttggaaacgggattacatacaaaaagcagagagctagcattctcagaaacttatttgtgatgtgtgccctcaactgacagtgttgaacctttgttttgatagagcagttctgaaacacactttttgtaaaatctgcaagaggatatttggatagctttgaggatttcgttggaaacgggaatgtcttcatgtaaactctagacagagcattctcagaaactgctttgggatgtttcaattgaagtcccagtgttgaacattcccattcatagagcaggtttgaaacactctttttgtactatctggaagtggacatttggagcgctttcaggtctacggtgaaaaaggagatatcttccaataaaaactagatagaagcaatgtcagaacttttttcatgatgtatctactcagctaacagagttgaacctttcttttgagagagcagttttgaaacactctttttgtggaatatgcaagtgggtattaggccagcttggaggatttcgttggaaacgggaatacgtataaaaagcagacagcagcattgtcagaaactactttgtgatgtttgcattcaagtcacagaattgaacactccctttcacagagcaggtttgaaacactctttttgtagtgtctgtaagtgaacatatggattgctttcaggcctaaggtgaaaaaggaaatatcttcccataaaaactagacagaagcattctcagaaacttgttcgtgatgtgtgccctctactgacagagttgaacctttctttgcaaagagcagctttgaaacactctttttgtagaatctgcaagaggatatgtggatagctttgaggatttcgttggaaacgggtatgtcttcagataaactctagacagaagcattctcagaaacttctttgggatgtttcaattgaagtcacagtgttgaacattccctttcacagagcaggtttgaaacactctttttgtagtgtctataagtgaacatttggcgtgctttcaggcctaacgtgaaaaaggaaatgtcttcccataaaaactagacagaagcattctcagaaacttgttcttgatgtgtcccctctactgacagagttgaacctttctttgcaaagagcagctttgaaacactctttttgtagaatctgcaagaggatatttggatagcttggaggatttcgttggaaacgggtatgtcttcagataaactctagacagaagcattctcagaaacttctttgggatgttgtattcaagtcacagagtagaacattcccattcatagagcagatttgaaacactctttttgtagtatctggaagtggacatttggagcgctttcaggcctatgttgaaaaaggaaatatcttcccataaaaactagacggaagcattctcagaaacttatttgtgatgtgtttgctcaactaacaggattgaaccatcgttttgaaggagcagttttgaaacactgttttcgtggaatctgcaagtggatatttggctagctttgaggatttcgttggaaacgggattacatataaaaaggagacagcagcattctcagaaacttctttgtgatgtctgcattcaattcacagagttgagcattccctttcctagagcacgttggaaacactctttttgtagtatctggatgaggacatttggagcgctttcaggcgtatggtgaaaaaggaaatatcttcccgtaaaaactagacagaagcattctcagaagtttatttgtgatgtgtgccctcaactaacagagttgaacctttcttttgatagagcagttttgaaacactctttttgtaaaatctgcaagaggatatttggatagctttgaggatttcgttgcaaacgggaatggcttcatataaactctagacagaagcattctcagaaacttcgttgggatgtttcgattgaagtcccagtgttgaacattcccttttatagagcaggttggaaacactctttctgcattccctggaagtggacatttggagcgctttcaggacgacggtgaaaatggaaatatcttccaagaaaatctagatagaagcaatgtcagaaacttttatgtgatggatctactcagctaacagagttgaaccttttttttgagagagcagttttgcaacactctttttgtggaatatgcaagtggatattagggcagctttgaggatttcgttggaaacgggaatacatgtaaaaagcagacagcagcattctcagaaacttctttgtgatgtttgcattgaagtcacagagttgaacattccctttgagagagcaggtttgaaacacgccttttgtcatatctggaagtgtccattcggagcgcattcaggcttgtgttgaaaaaggaaatatcctcccataaaaactagacagaagcattctcagaaacttatctgtgatgtatgtactcaactaacagaactaaaccatcgttttgaaggagcagttttgaaacactctttttgcggaatctgcaagtggatatttggctagctgggaggatttcgttggaaacgggattacatacaaaaagcagacagcagcattctcagtaaacttctttgtgatgtctgcattcaagtcacagagttgaacattccctttcatagagcaggtttgaaacactctttttgtagtatctggatgcggacatttggatcgctttcaggcctatggtgaaaaaggaaatatcttcccatgaaaactagacagaagcattctcagaaacttatttgtgatgtgtgccctcaactgacagtgttgaacctttgttttgatagagcagttctgaaacacactttttgtaaaatctgcaagaggatatttggatagctttgaggatttcgttggaaacgggaatgtcttcatgtaaactctagacagaagcattctcagaaactgctttgggatgtttcaattgaagtcccagtgttgaacattccctttcatagagcaggtttgaaacactctttttgtactatctggaagtggacatttggagcgctttcaggtctacggtgaaaaaggagatatcttccaataacaaccagatagaagcaatgtcagaacttttttcatgatgtatctactcagcaaacagagttgaacctttcttttgagagagcagttttgaaacactctttttgtggaatatgcaagtgggtattaggccagcttggaggatttcgttggaaacgggaatacgtataaaaagcagacagcagcattgtcagaaactactttgtgatgtttgcattcaagtcacagaactgaacactccctttcacagagcaggtttgaaacactctttttgtagtgtctgtaagtgaacatttggattgctttcaggcctaaggtgaaaaaggaaatatcttcccataaaaactagacagaagcattctcagaaacttgtttgtgatgtgtgccctctactgacagagttgaacctttctttgcaaagagcagttttgaaacactctttttgtagaatctgcaagaggatatttggatagctttgaggatttcttgggaaacgggaatgtcttcagataaactctagacagaagcattctcagaaacttctttgggatgtttcaattgaagtcacagtgttgaacattccctttcacagagcaggtttgaaacactctttttgtagtgtctataagtgaacatttggcgtgctttcaggcgtaacgtgaaaaaggaaatatcttcccataaaaactagacagaagcattctcagaaacttgttcgtgatgtgtgccctctactgacagagttgaacctttctttgcaaagagcagctttgaaacacactttttgtagaatctgcatgaggatatttggatagctttgaggatttccttggaaacgggtatgtcttcagataaactctagacagaagcattctcagaaacttctttgggatgttgcatgcaagtcacagagtagaacattcccattcatagagcagatttgaaacactctttttgtagtatctggaagtggacatttggagcgctttcaggcctatgttgaaaaaggaaatatcttcccataaaaactagacggaagcattctcagaaacttatttgtgatgtgtttgctcaactaacaggattgaaccatccttttgaaggagcagttttgaaacactgttttcgtggaatctgcaagtggatatttggctagctttgaggatttcgttggaaacgggattacatataaaaaggagacagcagcattctcagaaacttctttgtgatttctgcattcaattcacagagttgagcattccctttcatagagcaggttggaaacactctttttgtagtatctggatgaggacatttggagcgctttcaggcgtatggtgaaaaaggaaatatcttcccgtaaaaactagacagaagcattctcagaaatttatttgtgatgtgtgccctcaactaacagagttgaacctttcttttgatagagcagttttgaaacactctttttgtaaaatctgcaagaggatatttggatagctttgaggatttcgttgcaaacgggaatggcttcatataaactctagacagaagcattctcagaaacttcgttgggatgtttcgattgaagtcccagtgttgaacattcccttttatagagcaggttggaaacactctttctgcattccctggaagtggacatttggtgcgctttcaggacgactgtgaaaatggaaatatcttccaataaaatctagatagaagcaacgtcagaaacttttatgtgatggatctactcagctaacagagttgaacctttcttttgagagagcagttttgcaacactctttttgtggaatatgcaagtggatattagggcagctttgaggatttcgttggaaacgggaatacatgtaaaaagcagacagcagcattctcagaaacttctttgtgatgtttgcattgaagtcacagagttgaacattccctttgagagagcaggtttgaaacacgccttttgtcatatctggaagtgtccattcggagcgcattcaggcttgtgttgaaaaaggaaatatcctcccataaaaactagacagaagcattctcagaaacttatctgtgatgtatgtactcaactaacagaactaaaccatcgttttgaaggagcagttttgaaacactctttttgcggaatctgcaagtggatatttggctagctgggaggatttcgttggaaacgggattacatacaaaaagcagacagcagcattctcagaaacttctttgtgatgtttgcattcaagtcacagagttgaacattccctttcatagagcaggtttgaaacactctttttgtagtatctggatgtggacatttggatcgctttcaggcctatggtgaaaaaggaaatatcttcccatgaaaactagacagaagcattctcagaaacttatttgcgatgtgtgccctcaactgacagtgttgaacctttgttttgatagagcagttctgaaacacactttttgtaaaatctgcaagaggatatttggatagctttgaggatttcgttggaaacgggaatgtcttcatgtaaactctggacagaagcattctcagaaactgctttgggatgtttcaattgaagtcccagtgttgaacattccctttcatagagcaggtttgaaacactctttttgtactatctggaagtggacatttggagcgctttcaggtctacggtgaaaaaggagatatcttccaataaaaactagatagaagcaatgtcagaacttttttcatgatgtatctactcagcaaacagagttgaacctttcttttgagagagcagttttgaaacactctttttgtggaatatgcaagtgggtattaggccagcttggaggatttcgttggaaacgggaatacgtataaaaagcagacagcagcattgtcagaaactactttgtgatgtttgcattcaagtcacagaattgaacactccctttcacagagcaggtttgaaacactctttttgtagtgtctgtaagtgaacatttggattgcattcaggcctaaggtgaaaaaggaaatatcttcccataaaaactagacagaagcattctcagaaacttgtttgtgatgtgtgccctctactgacagagttgaacctttctttgcaaagagcagttttgaaacactctttttgtagaatctgcaagaggatatttggatagctttgaggatttcttgggaaacgggaatgtcttcagataaactctagacagaagcattctcagaaacttctttgggatgtttcaattgaagtcacagtgttgaacattccctttcacagagcaggtttgaaacactctttttgtagtgtctataattgaacatttggcgtgctttcaggcctaacgtgaaaaaggaaatatcttcccataaaaactagacagaagcattctcagtaaacttgtttgtgatgtgtgccctctactgacagagttgaacctttctttgcaaagagcagctttgaaacactctttttgtagaatctgcaagaggatatgtggatagctttgaggatttcgttggaaacgggtatgtcttcagataaactctagacagaagcattctcagaaacttctttgggatgttgcattcaagtcacagagtagaacattcccattcatagagcagatttgaaacactctttttgtagtatctggaagtggacatttggagcgctttcaggcctatgttgaaaaaggaaatatcttcccataaaaactagacggaagcattctcagaaacttacttgtgatgtgtttgctcaactaacagaattgaaccatcgttttgaaggagcagttttgaaacactgttttcgtggaatctgcaagtggatatttggctagctttgaggatttcgttggaaacgggattacatataaaaaggagacagcagcattctcagaaacttctttgtgatgtctgcattcaagtcacagagttgagcattccctttcatagagaaggttggaaacactctttttgtagtatctggatgaggacatttggagcgctttcaggcgtatggtgaaaaaggaaatatcttcccgtaaaaactagacagaagcattctcagaaatttatttgtgatgtgtgccctcaactaacagagttgaacctttcttttgatagagcagttttgaaacactctttttgtaaaatctgcaagaggatatttggatagctttgaggatttcattgcaaacgggaatggcttcatataaactctagacagaagcattctcagaaacttcgtcgggatgtttcgattgaagtcccagtgttgaacattcccttttatagagcaggttggaaacactctttctgcattccctggaagtggacatttggagcgctttcaggacgacggtgaaaatggaaatatcttccaataaaatctggatagaagcaatgtcagaaactattctgtgatggatctactcagctaacagagttgaacctttcttttgagagagcagttttgcaacactctttttgtggaatatgcaagtggatattagggcagctttgaggatttcgttggaaacgggaatacatgtaaaaagcagacagcagcattctcagaaacttctttgtgatgtttgcattgaagtcacagagttgaacattccctttgagagagcaggtttgaaacacgccttttgtcatatctggaagtgtccattcggagcgcattcaggcttgtgttgaaaaaggaaatatcctcccataaaaactagacagaagcattctcagaaacctatttgtgatgtatgtactcaactaacagaactaaaccatcgttttgaaggagcagttttgaaacactctttttgcggaatctgcaactggatatttggctagcttggaggatttcgttggaaacgggattacatacaaaaagcagacagcagcattctcagaaacttctttgtgatgtttgcattcaagtcgcagagttgaacattccctttcatagagcaggtttgaaacactctttttgtagtatctggatgtggacatttggatcgctttcaggcctatggtgaaaaaggaaatatcttcccatgaaaactagacagaagcattctcagaaacttatttgtgatgtgtgccctcaactgacagtgttgaacctttgttttgatagagcagttctgaaacacactttttgtaaaatctgcaagaggatatttggatagctttgaggatttcgttggaaacgggaatgtcttcatgtaaactctagacagaagcattctcagaaactgctttgggatgtttcaactgaagtcccagtgttgaacattccctttcatagagcaggtttgaaacactctttttggagtatctggaagtggacatttggagcgctttcaggtctacggtgaaaaaggagatatcctccaataaaaactagatagaagcaatgtcagaacttttttcatgatgtatctactcaggaaacagagctgaacctttcttttgacagagcagttttgaaacactctttttgtggaatatgcaagtgggtattaggccagcttggaggatttcgttggaaacgggaatacgtataaaaagcagacagcagcattgtcagaaactactttgtgatgtttgcattcaagtcacagaattgaacactccctttcacagagcaggtttgaaacactctttttgtagtgtctataagtgaacatttggcgtgctttcaggcctaacgtgaaaaaggaaatatcttcccataaaaactagacagaagcattctcagaaacttgttcgtgatgtgtgccctctactgacagagttgaacctttctttgcaaagagcagctttgaaacactctttttgtagaatctgcaagaggatatttggatagctttgaggatttcgttggaaacgggtatgtcttcagataaactctagacagaagcattctcagaaacttctttgggatgttgcattcaagtcacagagtagaacattcccattcatagagcagatttgaaacactctttttgtagtatctggaagtggacatttggagcgctttcaggcctatgttgaaaaaggaaatatcttcccataaaaactagacagaagcattctcagaaacttacttgtgatgtgtttgctcaactaacagaattgaaccatcgttttgaaggagcagttttgaaacactgttttcgtggaatctgcaagtggatatttggctagctttgaggatttcgttggaaacgggattacatataaaaaggagacagcagcattctcagaaacttctttgtgatgtctgcattcaagtcacagagttgagcattccctttcatagagcaggttggaaacactctttttgtagtatctggatgaggacatttggagcgctttcaggcgtatggtgaaaaaggaaatatcttcccataaaaactagacagaagcattctcagaaacttgtttgtgatgtgtgccctctactgacagagttgaacctttctttgcaaagagcagttttgaaacactctttttgtagaatctgcaagaggatatttggatagctttgaggatttcttgggaaacgggaatgtcttcagataaactctagacagaagcattctcagaaacttctttgggatgtttcaattgaagtcacagtgttgaacattccctttcacagagcaggtttgaaacactctttttgtagtgtctataagtgaacatttggcgtgctttcaggcgtaacgtgaaaaaggaaatatcttcccataaaaactagacagaagcattctcagaaacttgttcttgatgtgtcccctctactgacagagttgaacctttctttgcaaagagcagctttgaaacactctttttgtagaatctgcaagaggatatttggatagcttggaggatttcgttggaaacgggtatgacttcagataaactctagacagaagcattctcagaaacttctttgggatgttgcattcaagtcacagagtagaacattcccattcatagagcagatttgaaacactctttttgtagtatctggaagtggacatttggagcgctttcaggcctatgttgaaaaaggaaatatcttcccataaaaactagacggaagcattctcagaaacttatttgtgatgtgtttgctcaactaacaggattgaaccatcgttttgaaggagcagttttgaaacactgttttcgtggaatctgcaagtggatatttggctagctttgaggatttcgttggaaacgggattacatataaaaaggagacagcagcattctcagaaacttctttgtgatgtctgcattcaattcacagagttgagcattccctttcatagagcaggttggaaacactctttttgtagtatctggatgaggacatttggagcgctttcaggcgtatggtgaaaaaggaaatatcttcccgtaaaaaccagacagaagcattctcagaaatttatttgtgatgtgtgccctcaactaacagagttgaacctttcttttgatagagcagttttgaaacactctttttgtaaaatctgcaagaggatatttggatagctttgaggatttcgttgcaaacgggaatggcttcatataaactctagacagaagcattctcagaaacttcgttgggatgtttcgattgaagtcccagtgttgaacattcccattcatagagcaggtttgaaacactctttttgtactatctggaagtggacatttggagcgctttcaggtctacggtgaaaaaggagatatcttccaataaaaactagatagaagcaatgtcagaacttttttcatgatgtatctactcagcaaacagagttgaacctttcttttgagagagcagttttgaaacactctttttgtggaatatgcaagtgggtattaggccagcttggaggatttcgttggaaacgggaatacgtataaaaagcagacagcagcattgtcagaaactactttgtgatgtttgcattcaagtcacagaattgaacactccctttcacagagcaggtttgaaacactctttttgtagtgtctgtaagtgaacatatggattgctttcaggcctaaggtgaaaaaggaaatatcttcccataaaaactagacagaagcattctcagaaacttgtttgtgatgtgtgccctctactgacagagttgaacctttctttgcaaagagcagttttgaaacagtctttttgtagaatctgcaagaggatatttggatagctttgaggatttcttgggaaacgggaatgtcttcagataaactctagacagaagcattctcagaaacttctttgggatgtttcaattgaagtcacagtgttgaacattccctttcacagagcaggtttcaaacactctttttgtagtgtctataagtgaacatttggcgtgctttcaggcctaacgtgaaaaaggaaatatcttcccataaaaactagacagaagcattctcagaaacttgttcgtgatgtgtgccctccactgacagagttgaacctttctttgcaaagagcagctttgaaacactctttttgtagaatctgcaagaggatatgtggatagctttgaggatttcgttggaaacgggtatgtcttcagataaactctagacagaagcattctcagaaacttctttgggatgttgcattcaagtcacagagtagaacattcccattcatagagcagatttgaaacactctttttgtagtatctggaagtggacatttggagccctttcaggcctatgttgaaaaaggaaatatcttcccataaaaactagacggaagcattctcagaaacttatttgtgatgtgtttgctcaactaacaggattgaaccatcgttttgaaggagcagttttgaaacactgttttcgtggaatctgcaagtggatatttggctagctttgaggatttcgttggaaacgggattacatataaaaaggagacagcagcattctcagaaacttctttgtgatgtctgcattcaagtcacagagttgagcattccctttcatagagcaggttggaaacactctttttgtagtatctggatgaggacatttggagcgctttcaggcctatggtgaaaaaggaaatatcttcccgtaaaaactagacagaagcattctcagaagtttatttgtgatgtgtgccctcaactaacagagttgaacctttcttttgatagagcagttttgaaacactctttttgtaaaatctgcaagaggatatttggatagctttgaggatttcgttgcaaacgggaatggcttcatataaactctagacagaagcattctcagaaacctcgttgggatgtttcgattgaagtcccagtgttgaacattcccttttatagagcaggttggaaacactctttctgcattccctggaagtggacatttggagcgctttcaggacgacggtgaaaatggaaatatcttccaagaaaatctagatagaagcaacgtcagaaacttttctgtgatggatctactcagctaacagagttgaacctttcttttgagagagcagttttgcaacactctttttgtggaatatgcaagtggatattagggcagctttgaggatttcgttggaaacgggaatacatgtaaaaagcagacagcagcattctcagaaacttctttgtgatgtttgcattgaagtcacagagttgaacattccctttgagagagcaggtttgaaacacgccttttgtcatatctggaagtgtccattcggagcgcattcaggcttgtgttgaaaaaggaaatatcctcccataaaaactagacagaagcattctcagaaacttatctgtgatgtatgtactcaactaacagaactaaaccatcgttttgaaggagcagttttgaaacactctttttgcggaatctgcaagtggatatttggctagctgggaggatttcgttggaaacgggattacatacaaaaaggagacagcagcattctcagaaacttatttgtgatgtgtgccctcaactgacagtgttgaacctttgttttgatagagcagttctgaaacacaccttttgtaaaatctgcaagaggatatttggatagctttgaggatttcgttggaaacgggaatgtcttcatgtaaactctacacagaagcattctcagaaactgctttgggatgtttcaattgaagtcccagtgttgaatattccctttcatagagcaggtttgaaacactctttttgtactatctggaagtggacatttggagcgctttcaggtctacggtgaaaaaggagatatcttccaataaaaactagatagaagcaatgtcagaacttttttcatgatgtatctactcagcaaacagagttgaacctttcttttgagagagcagttttgaaacactctttttgtggaatatgaaagtgggtattaggccagcttggaggatttcgttggaaacgggaatacgtataaaaagcagacagcagcattgtcagaaactactttgtgatgtttgcattcaagtcaaagaactgaacactccctttcacagagcaggtttgaaacactctttttgtagtgtctgtaagtgaacatttggattgctttcaggcctaaggtgaaaaaggaaatatcttcccataaaaactagacagaagcattctcagaaacttgttcgtgatgtgtgccctctactgacagagttgaacctttctttgcaaagagcagttttgaaacactctttttgtagaatctgcaagaggatatttggatagctttgaggatttcttgggaaacgggaatgtcttcagataaactctagacagaagcattctcagaaacttctttgggatgtttcaattgaagtcacagtgttgaacattccctttcacagagcaggtttgaaacactctttttgtagtgtctataattgaacatttggcgtgctttcaggcctaacgtgaaaaaggaaatatcttcccataaaaactagacagaagcattctcagaaacttgttcgtgatgtgtgccctctactgacagagttgaacctttctttgcaaagagcagctttgaaacactctttttgtagaatctgcaagaggatatttggatagctttgaggatttcgttggaaacgggtatgtcttcagataaactctagacagaagcattctcagaaacttctttgggatgttgcattcaagtcacagagtagaacattcccattcatagagcagatttcaaacactctttttgtagtatctggaagtggacatttggagcgctttcaggcctatgttgaaaaaggaaatatcttcccataaaaactagacggaagcattctcagaaacttacttgtgatgtgtttgctcaactaacagaattgaaccatcgttttaaaggagcagttttgaaacactgttttcgtggaatctgcaagtggatatttggctagctttgaggatttcgttggaaacgggattacatataaaaaggagacagcagcattctcagaaacttctttgtgatgtctgcattcaagtcacagagttgagcattccctttcatagagaaggttggaaacactctttttgtagtatctggatgaggacatttggagcgctttcaggcgtatggtgaaaaaggaaatatcttcccgtaaaaactagacagaagcattctcagaagtttatttgtgatgtgtgccctcaaataacagagttgaacctttcttttgatagagcagttttgaaacactctttttgtaaaatctgcaagaggatatttggatagctttgaggatttcgttgcaaacgggaatggcttcatataaactctagacagaaagcattctcagaaacttcgtcgggatgtttcgattgaagtcccagtgttgaacattcccttttatagagcaggttggaaacactctttctgcattccctggaagtggacaattggagcgctttcaggacgacggtgaaaatggaaatatcttccaataaaatctggatagagcaatgtcagaaacttttatgtgatggatctactcagctaacagagttgaacctttcttttgagagagcagttttgcaacactctttttgtggaatatgcaagtggatattagggcagctttgaggatttcgttggaaacgggaatacatgtaaaaagcagacagcagcattctcagaaacttctttgtgatgtttgcattgaagtcacagagttgaacattccctttgagagagcaggtttgaaacacgccttttgtcatatctggaagtgtccattcggagcgcattcaggcttgtgttgaaaaaggaaatatcctcccagaaaaactagacagaagcattctcagaaacttatctgtgatgtatgtactcaactaacagaactaaaccatcgttttgaaggagtagttttgaaaaactctttttgcggaatctgcaagtggatatttggctagctgggaggatttcgttggaaacgggattacatccaaaaagcagacagcagcattctcagaaacttctttgtgatgtttgcattcaagtcacagagttgaacattccctttcatagagcaggtttgaaacactctttttgtagtatctggatgtggacatttggatcgctttcaggcctatggtgaaaaaggaaatatcttcccatgaaaactagacagaagcattctcagaaacttatttgtgatgtgtgccctcaactgacagtgttgaacctttgttttgatagagcagttctgaaacacactttttgtaaaatctgcaagaggatatttggatagctttgaggatttcgttggaaacgggaatgtcttcatgtaaactctacacagaagcattctcagaaactgcattgggatgtttcaattgaagtcccagtgttgaacattcccattcatagagcaggtttgaaacactctttttgtactatctggaagtggacatttggagcgctttcaggtctacggtgaaaaaggagatatcttccaataaaaactagatagaagcaatgtcagaacttttttcatgatgtatctactcagcacacagagttgaacctttcttttgagagagcagttttgaaacactctttttgtggaatatgcaagtgggtattaggccagcttggaggatttcgttggaaacgggaatatgtataaaaagcagacagcagcattgtcagaaactactttgtgatgtttgcattcaagtcacagaattgaacactccctttcacagagcaggtttgaaacactctttttgtagtgtctgtaagtgaacatatggattgctttcaggcctaaggtgaaaaaggaaatatcttcccataaaaactagacagaagcactctcagaaacttgtttgtgatgtgtgccctctactgacagagttgaacctttctttgcaaagagcagttttgaaacactccttttgtagaatctgcaagaggatatttggatagctttgaggatttcttgggaaacgggaatgtcttcagataaactctagacagaagcattctcagaaacttcttgggatatttcaattgaagtcacagtgttgaacattccctttcacagagcaggtttgaaacactctttttgtagtgtctataagtgaacatttggcgtgctttcaggcctaacgtgaaaaaggaaatatcttcccataaaaactagacagaagcattctcagaaacttgttcgtgatgtgtgccctctactgacagagttgaacctttctttgcaaagagcagctttgaaacactctttttgtagaatctgcaagaggatatttggatagctttgaggatttcgttggaaacgggtatgtcttcagataaactctagacagaagcattctcagaaacttctttgggatgttgcattcaagtcacagagtagaacattcccattcatagagcagatttgaaacactctttttgtagtatctggaagtggacatttggagcgctttcaggcctatgttgaaaaaggaaatatcttcccataaaaactagacggaagcattctcagaaacttacttgtgatgtgtttgctcaactaacagaattgaaccatcgttttgaaggagcagttttgaaacactgttttcgtggaatctgcaagtggatatttggctagctttgaggatttcgttggaaacgggattacatataaaaaggagacagcagcattctcagaaacttctttgtgatgtctgcattcaattcacagacttgagcattccctttcatagagcaggttggaaacactctttttgtagtatctggatgaggacatttggagcgctttcaggcgtatggtgaaaaaggaaatatcttcccgtaaaaactagacagaagcattctcagaaatttatttgtgatgtgtgccctcaactaacagagttgaacctttcttttgatagagcagttttgaaacactctttttgtaaaatctgcaagaggatatttggatagctttgaggatttcgttgcaaacgggaatggcttcatataaactctagacagaagcattctcagaaacctcgttgggatgtttcgattgaagtcccagtgttgaacattcccttttatagagcaggttggaaacactctttctgcattccctggaagtggacatttggagcactttcaggacgacggtgaaaatggaaatatcttccaagaaaatctagatagaagcaacgtcagaaacttttctgtgatggatctactcagctaacagagttgaacctttcttttgagagagcagttttgcaacactctttttgtggaatatgcaagtggatattagggcagctttgaggatttcgttggaaacgggaatacatgtaaaaagcagacagcagcattctcagaaacttctttgtgatgtttgcattgaagtcacagagttgaacattccctttgagagagcaggtttgaaacacgccttttgtcatatctggaagtgtccattcggagcgcattcaggcttgtgttgaaaaaggaaatatcctcccataaaaactagacagaagcattctcagaaacttatctgtgatgtatgtactcaactaacagaactaaaccatccttttgaaggagcagttttgaaacactctttttgcggaatctgcaagtggatatttggctagctgggaggatttcgttggaaacgggattacatacaaaaaggagacagcagcattctcagaaacttatttgtgatgtgtgcactcaactgacagtgttgaacctttgttttgatagagcagttctgaaacacactttttgtaaaatctgcaagaggatatttggatagctttgaggatttcgttggaaacgggaatgtcttcatgtaaactctagacagaagcattctcagaaactgctttgggatgtttcaattgaagtcccagtgttgaacattccctttcatagagcaggtttgaaacactctttttgtactatctggaagtggacatttggagcgctttcaggtctacggtgaaaaaggagatatcttccaataaaaactagatagaaagcaatgtcagaacttttttcatgatgtatctactcagcaaacagtagttgaacctttcttttgagagagcagttttgaaacactctttttgtggaatatgcaagtgggtattaggccagcttggaggatttcgttggaaacgggaatacgtataaaaagcagacagcagcattgtcagaaactactttgtgatgtttgcattcaagtcacagaattgaacactccctttcacagagcaggtttgaaacactctttttgtagtgtctgtaagtgaacatttggattgctttcaggcctaaggtgaaaaaggaaatatcttcccataaaaactagacagaagcattctcagaaacttgtttgtgatgtgtgccctctactgacagagttgaacctttctttgcaaagagcagttttgaaacactcttttgtagaatctgcaagaggatatttggatagctttgaggatttcttgggaaacgggaatgtcttcagataaactctagacagaagcattctcagaaacttctttgggatgtttcaattgaagtcacagtgttgaacattccctttcacagagcaggtttgaaacactctttttgtagtgtctataagtgaacatttggcgtgctttcaggcctaacgtgaaaaaggaaatatcttcccataaaaactagacagaagcattctcagaaacttgttcgtgatgtgtgccctctactgacagagttgaacctttctttgcaaagagcagctttgaaacacactttttgtagaatctgcaagaggatatttggatagcttggaggatttcgttggaaacgggtatgtcttcagataaactctagacagaagcattctcagaaacttctttgggatgttgcattcaagtcacagagtagaacattcccattcatagagcagatttgaaacactctttttgtagtatctggaagtggacatttggagcgctttcaggcctatgttgaaaaaggaaatatcttcccataaaaactagacggaagcattctcagaaacttatttgtgatgtgtttgctcaactaacaggattgaaccatcgttttgaaggagcagttttgaaacactgttttcgtggaatctgcaagtggatatttggctagctttgaggatttcgttggaaacgggattacatataaaaaggagacagcagcattctcagaaacttctttgtgatgtctgcattcaattcacagagttgagcattccctttcatagagcaggttggaaacactctttttgtagtatctggatgaggacatttggagcgctttcaggcgtatggtgaaaaaggaaatatcttcccgtaaaaactagacagaagcattctcagaaatttatttgtgatgtgtgccctcaactaacagagttgaacctttcttttgatagagcagttttgaaacactctttttgtaaaatctgcaagaggatatttggatagctttgaggatttcgttgcaaacgggaatggcttcatataaactctagacagaagcattctcagaaacttcgttgggatgtttcgattgaagtcccagtgttgaacattcccttttatagagcaggttggaaacactctttctgcattccctggaagtggacatttggagcgctttcaggacgacggtgaaaatggaaatatcttccaagaaaatctagatagaagcaacgtcagaaacttttctgtgatggatctactcagctaacagagttgaacctttcttttgagagagcagttttgcaacactctttttgtggaatatgcaagtggatattagggcagctttgaggatttcgttggaaacgggaatacatgtaaaaagcagacagcagcattctcagaaacttctttgtgatgtttgcattgaagtcacagagttgaacattccctttgagagagcaggtttgaaacacgccttttgtcatatctggaagtgtccattcggagcgcattcaggcttgtgttgaaaaaggaaatatcctcccagaaaaactagacagataagcattctcagaaacttatctgtgatgtatgtactcaactaacaggaactaaaccatcgttttgaaggagcagttttgaaacactctttttgcggaatctgcaagtggatatttggctagctgggaggatttcgttggaaacgggattacatacaaaaagcagagagcagcattctcagaaacttatttgtgatgtgtgccctcaactgacagtgttgaacctttgttttgatagagcagttctgaaacacactttttgtaaaatctgcaagaggatatttggatagctttgaggatttcgttggaaacgggaatgtcttcatgtaaactctagacagaagcattctcagaaactgctttgggatgtttcaattgaagtcccagtgttgaacattcccattcatagagcaggtttgaaacactctttttgtactatctggaagtggacatttggagcgctttcaggtctacggtgaaaaaggagatatcttccaataaatactagatagaaggaatgtcagaaactttttcatgatatatctactcagctaacagagttcaacctttcttttgagagagaagttttaaaacagtctttttgtggaatatgcaagtggatattaagccagcttggaggatttcgttggaaacgggaatgcatataaaaagcagacagcagcattctcagaaacttctttgtgatgtttgcattgaagtcccagatttgaacattccctttcttagagcaggtttgaaagacgccatttgtcatatctggaggttgtccatttggatcgcattccggcttgtgttgaaaaaggaaatatcctcccataaaaactagatagaagcattctcagaaacttgtttgtgatgtgtgccctctactgacagagttgaacctttctttgcaaagagcagttttgaaacactctttttgtagaatctgcaagaggatatttggatagctttgaggatttcttgggaaacgggaatgtcttcagataaactctagacagaagcattctcagaaacttctttgggatgtttcaattgaagtcacagtgttgaacattccctttcacagagcaggtttgaaacactctttttgtagtgtctataagtgaacatttggcgtgctttcaggcctaacgtgaaaaaggaaatatcttcccataaaaactagacagaagcattctcagaaacttgttcgtgatgtgtgccctctactgacagagttgaacctttctttgcaaagagcagctttgaaacactctttttgtagaatctgcaagaggatatttggatagcttggaggatttcgttggaaacgggtatgtcttcagataaactgctagacagaagcattctcagaaacttctttgggatgttgcattcaagtcacagagtagaacattcccattcatagagcagatttgaaacactctttttgtagtatctggaagtggacatttggagcgctttcaggcctatgttgaaaaaggaaatatcttcccataaaaactagacggaagcattctcagaaacttatttgtgatgtgtttgctcaactaacaggattgaaccatcgttttgaaggagcagttttgaaacactgttttcgtggaatctgcaagtggatatttggctagctttgaggatttcgttggaaacgggattacatatacaaaggagacagcagcattctcagaaacttctttgtgatgtctgcattcaattcacagagttgagcattccctttcctagagcacgttggaaacactctttttgtagtatctggatgaggacatttggagcgctttcaggcgtatggtgaaaaaggaaatatcttcccgtaaaaactagacagaagcattctcagaagtttatttgtgatgtgtgccctcaactaacagagttgaacctttcttttgatagagcagttttgaaacactctttttgtaaaatctgcaagaggatatttggatagctttgaggatttcgttgcaaacgggaatggcttcatataaactctagacagaagcattctcagaaacttcgttgggatgtttcgattgaagtcccagtgttgaacattcccttttatagagcaggttggaaacactctttctgcattccctggaagtggacatttggagcgctttcaggacgacggtgaaaatggaaatatcttccaagaaaatctagatagaagcaatgtcagaaacttttatgtgatggatctactcagctaacagagttgaacctttcttttgagagagcagttttgcaacactctttttgtggaatatgcaagtggatattagggcagctttgaggatttcgttggaaacgggaatacatgtaaaaagcagacagcagcattctcagaaacttctttgtgatgtttgcattgaagtcacagagttgaacattccctttgagagagcaggtttgaaacacgccttttgtcatatctggaagtgtccattcggagcgcattcaggcttgtgttgaaaaaggaaatatcctcccataaaaactagacagaagcattctcagaaacttatctgtgatgtatgtactcaactaacagaactaaaccatcgttttgaaggagcagttttgaaacactctttttgcggaatctgcaagtggatatttggctagctgggaggatttcgttggaaacgggattacatacaaaaagcagacagcagcattctcagaaacttctttgtgatgtttgctttcaagtcacagagttgagcattccctttcatagagcaggttggaaacactctttttgtagtatctggatgtggacatttggatcgctttcaggcctatggtgaaaaaggaaatatcttcccatgaaaactagacagaagcattctcagaaacttatttgtgatgtgtgccctcaactgacagtgttgaacctttgttttgatagagcagttctgaaacacactttttgtaaaatctgcaagaggatatttggatagctttgaggatttcgttggaaacgggaatgtcttcatgtaaactctacacagaagcattctcagaaactgctttgggatgtttcaattgaagtcccagtgttgaacattcccattcatagagcaggtttgaaacactctttttgtactatctggaagtggacatttggagcgctttcaggtctacggtgaaaaaggagatatcttccaataaaaactagatagaagcaatgtcagaacttttttcatgatgtatctactcagcaaacagagttgaacctttcttttgagagagcagttttgaaacactctttttgtggaatatgaaagtgggtattaggccagcttggaggatttcgttggaaacgggaatacgtataaaaagcagacagcagcattgtcagaaactactttgtgatgtttgcattcaagtcacagaactgaacactccctttcacagagcaggtttgaaacactctttttgtagtgtctgtaagtgaacatttggattgctttcaggcctaaggtgaaaaaggaaatatcttcccataaaaactagacagaagcattctcagaaacttgtttgtgatgtgtgccctctactgacagagttgaacctttctttgcaaagagcagttttgaaacactctttttttagaatctgcaagaggatatttggatagctttgaggatttcttgggaaacgggaatgtcttcagataaactctagacagaagcattctcagaaacttctttgggatgtttcaattgaagtcacagtgttgaacattccctttcacagagcaggtttgaaacactctttttgtagtgtctataattgaacatttggcgtgctttcaggcctaacgtgaaaaaggaaatatcttcccataaaaactagacagaagcattctcagaaacttgttcgtgatgtgtgccctctactgacagagttgaacctttctttgcaaagagcagctttgaaacactctttttgtagaatctgcaagaggatatttggatagctttgaggatttcgttggaaacgggtatgtcttcagataaactctagacagaagcattctcagaaatttctttgggatgttgcatgcaagtcacagagtagaacattcccattcatagagcagatttgaaacactctttttgtagtatctggaagtggacatttggagcgctttcaggcctatgttgaaaaaggaaatatcttcccataaaaactagacggaagcattctcagaaacttatttgtgatgtgtttgctcaactaacaggattcaaccatcgttttgaaggagcagttttgaaacactgttttcgtggaatctgcaagtggatatttggctagctttgaggatttcgttggaaacgggattacatataaaaaggagacagcagcattctcagaaacttctttgtgatgtctgcattcaattcacagagttgagcattccctttcatagagcaggttggaaacactctttttgtagtatctggatgaggacatttggagcgctttcaggcgtatggtgaaaaaggaaatatcttcccgtaaaaactagacagaagcattctcagaagtttatttgagatgtgtgccctcaactaacagagttgaacctttcttttgatagagcagttttgaaacactctttttgtaaaatctgcaagaggatatttggatagctttgaggatttcgttgcaaacgggaatggcttcatataaactctagacagaagcattctcagaaacttcgttgggatgtttcgattgaagtcccagtgttgaacattcccttttatagagcaggttggaaacactctttctgcattccctggaagtggacatttggagcgctttcaggacgacggtgaaaatggaaatatcttccaagaaaatctagatagaagcaatgtcagaaacttttatgtgatggatctactcagctaacagagttgaacctttcttttgagagagcagttttgcaacactctttttgtggaatatgcaagtggatattagggcagctttgaggatttcgttggaaacgggaatacatgtaaaaagcagacagccagcattctcagaaacttctttgtgatgtttgcattgaagtcacagagttgaacattccctttgagagagcaggtttgaaacacgccttttgtcatatctggaagtgtccattcggagcgcattcaggcttgtgttgaaaaaggaaatatcctcccataaaaactagacagagcattctcagaaacttatctgtgatgtatgtactcaactaacagaactaaaccatcgttttgaaggagcagttttgaaacactctttttgcggaatctgcaagtggatatttggctagctgggaggatttcgttggaaacgggattacatacaaaaagcagacagcagcattctcagaaacttctttgtgatgtttgcattcaagtcacagagttgaacattccctttcatagagcaggtttgaaacactctttttgtagtatctggatgtggacatttggatcgctttcaggcctatggtgaaaaaggaaatatcttcccatgaaaactagacagaagcattctcagaaacttatttgtgatgtgtgccctcaactgacagtgttgaacctttgttttgatagagcagttctgaaacacactttttgtaaaatctgcaagaggatatttggatagctttgaggatttcgttggaaacgggaatgtcttcatgtaaactctagacagaagcattctcagaaactgctttgggatgtttcaattgaagtcccagtgttgaaccttcccattcatagagcaggtttgaaacactctttttgtactatctggaagtggacattttgagcgctttcaggtctacggtgaaaaaggagatatcttccagtaaaaactagatagaagcaatgtcagaacttttttcatgatgtatctactcagcaaacagagttgaacctttcttttgagagagcagttttgaaacactccttttgtggaatatgcaagtgggtattaggccagcttggaggatttcgttggaaacgggaatacgtataaaaagcagacagcagcattgtcagaaactactttgtgatgtttgcattcaagtcacagaattgaacactctctttcacagagcaggtttgaaactctctttttgtagtgtctgtaagtgaacatttggattgatttcaggcctaaggtgaaaaaggaaatatcttcccataaaaactagacagaagcattctcagaaacttgtttgtgatgtgtgccctctactgacagagttgaacctttctttgcaaagagcagttttgaaacactctttttgtagaatctgcaagaggatatttggatagctttgaggatttcttgggaaacgggaatgtcttcagataaactctagacagaagcattctcagaaacttctttgggatgtttcaattgaagtcacagtgttgaacattccctttcacagagcaggtttgaaacactctttttgtagtgtctataattgaacatttggcgtgctttcaggcctaacgtgaaaaaggaaatatcttcccataaaaactagacagaagcattctcagaaacttgttcgtgatgtgtgccctctactgacagagttgaacctttctttgcaaagagcagctttgaaacacactttttgtagaatctgcaagaggatatttggatagcttggaggatttcgttggaaacgggtatgtcttcagataaactctagacagaagcattctcagaaacttctttgggatgttgcattcaagtcacagagtagaacattcccattcatagagcagatttgaaacactctttttgtagtatctggaagtggacatttggagcgctttcaggcctatgttgaaaaaggaaatatcttcccataaaaactagacggaagcattctcagaaacttatttgtgatgtgtttgctcaactaacaggattgaaccatcgttttgaaggagcagttttgaaacactgttttcgtggaatctgcaagtggatatttggctagctttgaggatttcgttggaaacgggattacatataaaaaggagacagcagcattctcagaaacttctttgtgatgtctgcattcaagtcacagagttgagcattccctttcatagagcaggttggaaacactctttttgtagtatctggatgaggacatttggagcgctttcaggcgtatggtgaaaaaggaaatatcttcccgtaaaaactagacagaagcattctcagaaatttatttgtgatgtgtgccctcaactaacagagttgaacctttcttttgatagagcagttttgaaacactctttttgtaaaatctgcaagaggatatttggatagctttgaggatttcgttgcaaacgggaatggcttcatataaactctagacagaagcattctcagaaacttcgttgggatgtttcgattgaagtcccagtgttgaacattcccttttatagagcaggttggaaacactctttctgcattccctggaagtggacatttggagcgctttcaggacgacggtgaaaatggaaatatcttccaagaaaatctagatagaagcaacgtcagaaacttttctgtgatggatctacttagctaccagagttgaacctttcttttgagagagcagttttgcaacactctttttgtggaatatgcaagtggatattagggcagctttgaggatttcgttggaaacgggaatacatgtaaaaagcagacagcagcattctcagaaacttctttgtgatgtttgcattgaagtcacagagttgaacattccctttgagagagcaggtttgaaacacgccttttgtcatatctggaagtgtccattcggagcgcattcaggcttgtgttgaaaaaggaaatatcctcccataaaaactagacagaagcattctcagaaacttatctgtgatgtatgtactcaactaacagaactaaaccatcgttttgaaggagcagttttgaaacactctttttgcggaatctgcaagtggatatttggctagctgggaggatttcgttggaaacgggattacatacaaaaagcagacagcagcattctcagaaacttctttgtgatgtttgcattcaagtcacagagttgagcattccctttcatagagcaggttggaaacactctttttgtagtatctggatgtggacatttggatcgctttctggcgtatggtgaaaaaggaaatatcttcccatgaaaactagacagaaagcattctcagaaatttatttgtgatgtgtgccctcaactaacagagttgaacctttcttttgatagagcagttttgaaacactctttttgtaaaatctgcaagaggatatttggatagctttgaggatttcgttgcaaacgggaatggcttcatataaactctagacagaagcattctcagaaacttcgttgggatgtttcaattgaagtcccagtgttgaacattcccttttatagagcaggttggaaacactctttctgcattccctggaagtggacatttggagcgctttcaggacgacggtgaaaatggaaatatcttccaagaaaatctagatagaagcaacgtcagaaacttttctgtgatggatctactcagctaacagagttgaacctttcttttgagagagcagttttgcaacactctttttgtggaatatgcaagtggatattagggcagctttgaggatttcgttggaaacgggaatacatgtaaaaagcagacagcagcattctcagaaacttctttgtgatgtttgcattgaagtcacagagttgaacattccctttgagagagcaggtttgaaacacgccttttgtcatatctggaagtgtccattcggagcgcattcaggcttgtgttgaaaaaggaaatatcctcccataaaaactagacagaagcattctcagaaacttatctgtgatgtatgtactcaactaacagaactaaaccatcgttttgaaggagcagttttgaaacactctttttgcggaatctgcaagtggatatttggctagctgggaggatttcgttggaaacgggattacatacaaaaagcagacagcagcattctcagaaacttctttgtgatgtttgcattcaagtcacagagttgaacattccctttcatagagcaggtttgaaacactctttttgtagtatctggatgtggacatttggatcgctttcaggcgtatggtgaaaaaggaaatatcttcccatgaaaactagacagaagcattctcagaaacttatttgtgatgtgtgccctcaactgacagtgttgaacctttgttttgatagagcagttctgaaacacactttttgtaaaatctgcaagaggatatttggatagctttgaggatttcgttggaaacgggaatgtcttcatgtaaactctagacagaagcattctcagaaactgctttgggatgtttcaattgaagtcccagtgttgaacattccctttcatagagcaggtttgaaacactctttttgtactatctggaagtggacatttggagcgctttcaggtctacggtgaaaaaggagatatcttccaataaaaactagatagaagcaatgtcagaacttttttcatgatgtatctactcagcacacagagttgaacctttcttttgagagagcagttttgaaacactctttttgtggaatatgcaagtgggtattaggccagcttggaggatttcgttggaaacgggaatacgtataaaaagcagacagcagcattgtcagaaactactttgtgatgtttgcattcaagtcacagaattgaacactccctttcacagagcaggtttgaaacactctttttgtagtgtctgtaagtgaacatatggattgctttcaggcctaaggtgaaaaaggaaatatcttcccataaaaactagacagaagcattctcagaaacttgtttgtgatgtgtgccctctactgacagagttgaacctttctttgcaaagagcagttttgaaacactctttttgtagaatctgcaagaggatatttggatagctttgaggatttcttgggaaacgggaatgtcttcagataaactctagacagaagcattctcagaaacttctttgggatgtttcaattgaagtcacagtgttgaacattccccttcacagagcaggtttgaaacactctttttgtagtgtctataagtgaacatttggcgtgctttcaggcctaacgtgaaaaaggaaatatcttcccataaaaactagacagaagcattctcagaaacttgttcgtgatgtgtgccctctactgacagagttgaacctttctttgcaaagagcagctttgaaacacactttttgtagaatctgcaagaggatatttggatagctttgaggatttcgttggaaacgggtatgtcttcagataaactctagacagaagcattctcagaaacttctttggcatgttgcattcaagtcacagagtagaacattcccattcatagagcagatttgaaacactctttttgtagtatctggaagtggacatttggagcgctttcaggcctatgttgaaaaaggaaatatcttcccataaaaactagacggaagcattctcagaaacttatttgtgatgtgtttgctcaactaacaggattgaaccatcgttttgaaggagcagttttgaaacactgttttcgtggaatctgcaagtggatatttggctagctttgaggatttcgttggaaacgggattacatataaaaaggagacagcagcattctcagaaacttctttgtgatgtctgcattcaattcacagagttgagcattccctttcatagagcaggttggaaacactctctttgtagtatctggatgaggacatttggagcgctttcaggcgtatggtgaaaaaggaaatatcttcccgtaaaaactagacagaagcattctcagaagtttatttgtgatgtgtgccctcaactaacagagttgaacctttcttttgatagaacagttttcaaacactctttttgtaaaatctgcaagaggatatttggatagctttgaggatttcgttgcaaacgggaatggcttcatataaactctagacagaagcattctcagaaacttcgttgggatgtttcgattgaagtcccagtgttgaacattcccttttatagagcaggttggaaacactctttctgcattccctggaagtggacatttggagcgctttcaggacgacggtgaaaatggaaatatcttccaagaaaatctagatagaagcaacgtcagaaacttttatgtgatggatctactcagctaacagagttgaagctttcttttgagagagcagttttgcaacactctttttgtggaatatgcaagtggatattagggcagctttgaggatttcgttggaaacgggaatacatgtaaaaagcagacagcagcattctcagaaacttctttgtgatgtttgcattgaagtcacagagttgaacattccctttgagagagcaggtttgaaacacgccttttgtcatatctggaagtgtccattcggagcgcattcaggcttgtgttgaaaaaggaaatatcctcccataaaaactagacagaagcattctcagaaacttatctgtgatgtatgtactcaactaacagaactaaaccatcgttttgaaggagcagttttgaaacactctttttgcggaatctgcaagtggatatttggctagctgggaggatttcgttggaaacgggattacatacaaaaagcagacagcagcattctcagaaacttctttgtgatgtttgcattcaagtcacagagttgaacattccctttcatagagcaggttggaaacactctttttgtagtatctggatgtggacatttggatggctttcaggcctatggtgaaaaaggaaatatcttcccatgaaaactagacagaagcattctcagaaacttatttgtgatgtgtgccctcaactgacagtgttgaacctttgttttgatagagcagttctgaaacacactttttgtaaaatctgcaagaggatatttggatagctttgaggatttcgttggaaacgggaatgtcttcatgtaaactctagacagaagcattctcagaaactgctttgggatgtttcaattgaagtcccagtgttgaacattcccattcatagagcaggtttgaaacactctttttctactatctggaagtggacatttggagcgctttcaggtctacggtgaaaaaggagatatcttccaataaaaactagatagaagcaatgtcagaacttttttcatgatgtatctactcagcaaacagagttgaacctttcttttgagagagcagttttgaaacactctttttgtggaatatgcaagtgggtattaggccagcttggaggatttcgttggaaacgggaatacgtataaaaagcagacagcagcattgtcagaaactactttgtgatgtttgcattcaagtcacagaattgaacactccctttcacagagcaggtttgaaacactctttttgtagtgtctgtaagtgaacatttggattgctttcaggcctaaggtgaaaaaggaaatatcttcccataaaaaccagacagaagcattctcagaaacttgtttgtgatgtgtgccctctactgacagagttgaacctttctttgcaaagagcagttttgaaacactctttttgtagaatctgcaagaggatatttggatagctttgaggatttcttgggaaacgggaatgtcttcagataaactctagacagaagcattctcagaaacttctttgggatgtttcaattgaagtcacagtgttgaacattccctttcacagagcaggtttgaaacactctttttgtagtgtctataagtgaacatttggcgtgctttcaggcgtaacgtgaaaaaggaaatatcttcccataaaaaccagacagaagcattctcagaaacttgttcctgatgtgtgccctctaactgacagagttgaacctttctttgcaaagagcagctttgaaacactctttttgtagaatctgcaagaggatatttggatagctttgaggatttcgttggaaacggggatgtcttcagataaactctagacagaagcattctcagaaacttctttgggatgttgcattcaagtcacagagtagaacattcccattcatagagcagatttgaaacactctttttgtagtatctggaagtggacatttggagcgctttcaggcctatgttgaaaaaggaaatatcttcccataaaaactagacggaagcattctcagaaacttatttgtgatgtgtttgctcaactaacaggattgaaccatcgttttgaaggagcagttttgaaacactgttttcgtggaatctgcaagtggatatttggctagctttgaggatttcgttggaaacgggattacatataaaaaggagacagcagcattctgagaaacttctttgtgatgtctgcattcaattcacagagttgagcattccctttcatagagcaggtttgaaacactctttttgtagtatctggatgtggacatttggatcgctttcaggcctatggtgaaaaaggaaatatcttcccatgaaaactagacagaagcattctcagaaacttacttgtgatgtgtgccctcaactgacagtgttgaacctttgttttgatagagcagttctgaaacacactttttgtaaaatctgcaagaggatatttggatagctttgaggatttcgttggaaacgggaatgtcttcatgtaaactctacacagaagcattctcagaaactgctttgggatgtttcaattgaagtcccagtgttgaacattcccattcatagagcaggtttgaaacactctttttgtactatctggaagtggacatttggagcgctttcaggtcctacggtgaaaaaggagatatcttccaataaaaactagatagaagcaatgtcagaacttttttcatgatgtatctactcagcaaacagagttgaacctttcttttgagagagcagttttgaaacactctttttgtggaatatgcaagtgggtattaggccagcttggaggatttcgttggaaacgggaatacgtataaaaagcagacagcagcattgtcagaaactactttgtgatgtttgcattcaagtcacagaattgaacactccctttcacagagcaggtttgaaacactctttttgtagtgtctgtaagtgaacatttggattgatttcaggcctgaggtgaaaaaggaaatatcttcccataaaaactagacagaagcattctcagaaacttgtttgtgatgtgtgccctctactgacagagttgaacctttctttgcaaagagcagttttgaaacactctttttgtagaatctgcaagaggatatttggatagctttgaggatttcttgggaaacgggaatgtcttcagataaactctagacagaagcattctcagaaacttctttgggatgtttcaattgaagtcacagtgttgaacattccctttcacagagcaggtttgaaacactctttttgtagtgtctataagtgaacatttggcgtgctttcaggcgtaacgtgaaaaaggaaatatcttcccataaaaactagacagaagcattctcagaaacttgttcgtgatgtgtgccctctactgacagagttgaacctttcttttcaaagagcagctttgaaacacactttttgtagaatctgcaagaggatatttggatagttttgaggatttcgttggaaacgggtatgtcttcagataaactctagacagaagcattctcagaaatttctttgggatgttgcatgcaagtcacagagtagaacattcccattcatagagcagatttgaaacactctttttgtactatctggaagtggacatttggagcgctttcaggcctatgttgaaaaaggaaatatcttcccataaaaactagacggaagcattctcagaaacttatttgtgatgtgtttgctcaactaacaggattgaaccatcgttttgaaggagcagttttgaaacactgttttcgtggaatctgcaagtggatatttggctagctttgaggatttcgttggaaacgggattacatataaaaaggagacagcagcattctcagaaacttctttgtgatgtctgcattcaattcacagagttgagcattccctttcatagagcaggttggaaacactctttttgtagtatctggatgaggacatttggagcgctttcaggcgtatggtgaaaaaggaaatatcttcccgtaaaaactagacagaagcattctcagaagtttatttgcgatgtgtgccctgaactaacagacttgaacctttcttttgatagagcagttttgaaacactcattttgtaaaatctgcaagaggatatttggatagctttgaggatttcgttgcaaacgggaatggcttcatataaactctagacagaagcattctcagaaacttcgtcgggatgtttcgattgaagtcccagtgttgaacattcccttttatagagcaggttggaaacactctttctgcattccctggaagtggacaattggagcgctttcaggacgacggtgaaaatggaaatatcttccaataaaatctggatagaagcaacatcagaaacttttatgtgatggatctactcagctaacagagttgaacctttcttttgagagagcagttttgcaacactctttttgtggaatacgcaagtggatattagggcagctttgaggatttcgttggaaacgggaatacatgtaaaaagcagacagcaagcattctcagaaacttctttgtgatgtttgcattgaagtcacagagttgaacattccctttgagagagcaggtttgaaacacgccttttgtcatatctggaagtgtccattcggagcgcattcaggcttgtgttgaaaaaggaaatatcctcccataaaaactagacagaagcattctcagaaacttatctgtgatgtatgtactcaactaacagaactaaaccatcgttttgaaggagcagttttgaaacactctttttgcggaatctgcaagtggatatttggctagctgggaggatttcgttggaaacgggattacatacaaaaagcagacagcagcattctcagaaacttctttgtgatgtttgcattcaagtcacagagttgaacattccctttcatagagcaggtttgaaacactctttttgtagtatctggatgtggacatttggatcgctttcaggcctatggtgaaaaaggaaatatcttccccatgaaaactagacagaagcattctcagaaatttatttgtgatgtgtgccctcaactaacagagttgaacctttcttttgatagagcagttttgaaacactctttttgtaaaatctgcaagaggatatttggatagctttgaggatttcgttgcaaacgggaatggcttcatataaactctagacagaagcattctcagaaacctcgttgggatgtttcgattgaagtcccagtgttgaacattcccttttatagagcaggttggaaacactctttctgcattccctggaagtggacatttggagcgctttcaggacgacggtgaaaatggaaatatcttccaagaaaatctagatagaagcaacgtcagaaacttttctgtgatggatctactcagctaacagagttgaacctttcttttgagagagcagttttgcaacactctttttgtggaatatgcaagtggatattagggcagctttgaggatttcgttggaaacgggaatacatgtaaaaagcagacagcagcattctcagaaacttctttgtgatgtttgcattgaagtcacagagttgaacattccctttgagagagcaggtttgaaacacgccttttgtcatatctggaagtgtccattcggagcgcattcaggcttgtgttgaaaaaggaaatatcctcccataaaaactagacagaagcattctcagaaacttatctgtgatgtatgtactcaactaacagaactaaaccatcgttttgaaggagcagttttgaaacactctttttgcggaatctgcaagtgggtatttggctagctgggaggatttcgttggaaacgggattacatacaaaaagcagacagcagcattctcagaaacttatttgtgatgtgtgccctcaactgacagtgttgaacctttgttttgatagagcagttctgaaacacactttttgtaaaatctgcaagaggatatttggatagctttgaggatttcgttggaaacgggaatgtcttcatgtaaactctacacagaagcattctcagaaactgctttgggatgtttcaattgaagtcccagtgttgaacattcccattcatagagcaggtttgaaacactctttttgtactatctggaagtggacatttggagcgctttcaggtctacggtgaaaaaggagatatcttccaataaaaactagatagaagcaatgtcagaacttttttcatgatgtatctactcagcaaacagagttgaacctttcttttgagagagcagttttgaaacactctttttgtggaatatgcaagtgggtattaggccagcttggaggatttcgttggaaacgggaatacgtataaaaagcagacagcagcattgtcagaaactactttgtgatgtttgcattcaagtcacagaattgaacactccctttcacagagcaggtttgaaacactctttttgtagtgtctgtaagtgaacatttggattgcttcaggcctaaggtgaaaaaggaaatatcttcccataaaaactagacagaagcactctcagaaacttgtttgtgatgtgtgccctctactgacagagttgaacctttctttgcaaagagcagttttgaaacactccttttgtagaatctgcaagaggatatttggatagctttgaggatttcttgggaaacgggaatgtcttcagataaactctagacagaagcattctcagaaacttctttgggatgtttcaattgaagtcacagtgttgaacattccctttcacagagcaggtttgaaacactctttttgtagtgtctataagtgaacatttggcgtgctttcaggcctaacgtgaaaaaggaaatatcttcccataaaaactagacagaagcattctcagaaacttgttcgtgatgtgtgccctctactgacagagttgaacctttctttgcaaagagcagctttgaaacactctttttgtagaatctgcaagaggatatttggatagctttgaggatttcgttggaaacggggatgtcttcagataaactctagacagaagcattctcagaaacttctttgggatgttgcattcaagtcacagagtagaacattcccattcatagagcagatttgaaacactctttttgtagtatctggaagtggacatttggagcgctttcaggcctatgttgaaaaaggatatatcttcccataaaaactagacggaagcattctcagaaacttacttgtgatgtgtttgctcaactaacagaattgaaccatcgttttgaaggagcagttttcaaacactgttttcgtggaatctgcaagtggatatttggctagctttgaggatttcgttggaaacgggattacatataaaaaggagacagcaccattctcagaaacttctttgtgctgtctgcattcaagtcacagagttgagcattccctttcatagagcaggttggaaacactctttttgtagtatctggatgaggacatttggagcgctttcaggcgtatggtgaaaaaggaaatatcttcccgtaaaaactagacagaagcattctcagaaatttatttgtgatgtgtgccctcaactaacagagttgaacctttcttttgatagagcagttttgaaacactctttttgtaaaatctgcaagaggatatttggatagctttgaggatttcgttgcaaacgggaatggcttcatataaactctagacagaagcattctcagaaacttcgttgggatgtttcgattgaagtcccagtgttgaacattcccttttatagagcaggttggaaacactctttctgcattccctggaagtggacatttggagcgctttcaggacgacggtgaaaatggaaatatcttccaagaaaatctagatagaagcaacgtcagaaacttttctgtgatggatctactcagctaacagagttgaacctttcttttgagagagcagttttgcaacactctttttgtggaatatgcaagtggatattagggcagctttgaggatttcgttggaaacgggaatacatgtaaaaagcagacagcagcattctcagaaacttctttgtgatgtttgcattgaagtcacagagttgaacattccctttgagagagcaggtttgaaacacgccttttgtcatatctggaagtgtccattcggagcgcattcaggcttgtgttgaaaaaggaaatatcctcccataaaaactagacagaagcattctcagaaacttatttgtgatgtatgtactcaactaacagaactaaaccatcgttttgaaggagcagttttgaaacactctttttgcggaatctgcaagtggatatttggctagctgggaggatttcgttggaaacgggattacatacaaaaagcagagagcagcattctcagaaacttatttgtgatgtgtgccctcaactgacagtgttgaacctttgttttgatagagcagttctgaaacacactttttgtaaaatctgcaagaggatatttggatagctttgaggatttcgttggaaacgggaatgtcttcatgtaaactctagacagaagcattctcagaaactgctttgggatgtttcaattgaagtcccagtgttgaacattcccattcatagagcaggtttgaaacactctttttgtactatctggaagtggacatttggagcgctttcaggtctacggtgaaaaaggagatatcttccaataaaaactagatagaagcaatgtcagaactttttccatgatgtatctactcagcaaacacagttgaacctttcttttgagagagcagttttgaaacactctttttgtggaatatgcaagtgggtattaggccagcttggaggatttcgttggaaacgggaatacgtataaaaagcagacagcagcattgtcagaaactactttgtgatgtttgcattcaagtcacagaattgaacactccctttcacagagcaggtttgaaacactctttttgtagtgtctgtaagtgaacatatggattgctttcaggcctaaggtgaaaaaggaaatatcttcccataaaaactagacagaagcattctcagaaacttgtttgtgatgtgtgccctctactgacagagttgaacctttctttgcaaagagcagttttgaaacactctttttgtagaatctgcaagaggatatttggatagctttgaagatttcttgggaaacgggaatgtcttcagataaactctagacagaagcattctcagaaacttctttgggatgtttcaattgaagtcacagtgttgaacattccctttcacagagcaggtttgaaacactctttttgtagtgtctataagtgaacatttggcgtgctttcaggcctaacgtgaaaaaggaaatatcttcccataaaaactagacagaagcattctcagaaacttgttcatgatgtgtgccctctactgacagagttgaacctttctttgcaaagagcagctttgaaacactctttttgtagaatctgcaagaggatatttggatagcttggaggatttcgttggaaacgggtatgtcttcagataaactctagacagaagcattctcagaaacttctttgggatgttgcattcaagtcacagagtagaacattcccattcatagagcagatttgaaacactctttttgtagtatctggaagtggacatttggagcgctttcaggcctatgttgaaaaaggaaatatcttcccataaaaactagacggaagcattctcagaaacttatttgtgatgtgtttgctcaactaacaggattgaaccatcgttttgaaggagcagttttgaaacactgttttcgtggaatctgcaagtggatatttggctagctgggaggatttcgttggaaacgggattacatataaaaaggagacagcaagcattctcagaaacttctttgtgatgtctgcattcaattcacagagttgagcattccctttcatagagcaggttggaaacactctttttgtagtatctggatgaggacatttggagcgctttcaggcgtatggtgaaaaaggaaatatcttcccgtaaaaactagacagaagcattctcagaagtttatttctgatgtgtgccctcaactaacagagttgaacctttcttttgatagagcagttttgaaacactctttttgtaaaatctgcaagaggatatttggatagctttgaggatttcgttgcaaacgggaatggcttcatataaactctagacagaagcattctcagaaacttcgtcgggatgtttcgattgaagtcccagtgttgaacattcccttttatagagcaggttggaaacactctttctgcattccctggaagtggacatttggagcgctttcaggacgacggtgaaaatggaaatatcttccaataaaatctggatagaagcaatgtcagaaacttttatgtgatggatctactcagctaacagagttgaacctttcttttgagagagcagttttgcaacactctttttgtggaatatgcaagtggatattagggcagctttgaggatttcgttggaaacgggaatacatgtaaaaagcagacagcagcattctcagaaacttctttgtgatgtttgcattgaagtcacagagttgaacattccctttgagagagcaggtttgaaacacgccttttgtcatatctggaagtgtccattcggagcgcattcaggcttgtgttgaaaaaggaaatatcctcccagaaaaactagacagaagcattctcagcaaacttatctgtgatgtatgtactcaactaacagaactaaaccatcgttttgaaggagcagttttgaaacactctttttgcggaatctgcaagtggatatttggctagctgggaggatttcgttggaaacgggattacatacaaaaagcagacagcagcattctcagaaacttctttgtgatgtttgcattcaagtcacagagttgaacattccctttcatagagcaggtttgaaacactctttttgtagtatctggatgtggacatttggatcgctttcaggcctatggtgaaaaaggaaatatcttcccatgaaaactagacagaagcattctcagaaacttatttgtgatgtgtgccctcaactgacagtgttgaacctttgttttgatagagcagttctgaaacacactttttgtaaaatctgcaagaggatatttggatagctttgaggatttcgttggaaacgggaatgtcttcatgtaaactctagacagaagcattctcagaaactgctttgggatgtttcaattgaagtcccagtgttgaacattcccattcatagagcaggtttgaaacactctttttgtactatctggaagtggacatttggagcgctttcaggtctacggtgaaaaaggagatatcttccaataaaaactagatagaagcaatgtcagaacttttttcatgatgtatctactcagcaaacagagttgaacctttcttttgagagagcagttttgaaacactctttttgtggaatatgtaagtgggtattaggccagcttggaggatttcgttggaaacgggaatacgtataaaaagcagacagcagcattgtcagaaactactttgtgatgtttgcattcaagtcacagaattgaacactccctttcacagagcaggtttgaaacactctttttgtagtgtctgtaagtgaacatttggattgctttcaggcctaaggtgaaaaaggaaatatcttcccataaaaactagacagaagcattctcagaaacttgtttgtgatgtgtgccctctactgacagagctgaacctttctttgcaaagagcagttttgaaacactctttttgtagaatctgcaagaggatatttggatagctttgaggatttcttgggaaacgggaatgtcttcagataaactctagacggaagcattctcagaaacttctttgggatgtttcaattgaagtcacagtgttgaacattccctttcacagagcaggtttgaaacattctttttgtagtgtctataagtgaccatttggcgtgctttcaggcctaacgtgaaaaaggaaatatcttcccataaaaactagacagaagcattctcagacacttgttcgtgatgtgtgccctctactgacagagttgaacctttctttgcaaagagcagctttgaaacactctttttgtagaatctgcaagaggatatttggatagcttggaggatttcgttggaaacgggtatgtcttcagataaactctagacagaagcattctcagaaacttctttgggatgttgcattcaagtcacagagtagaacattcccattcatagagcagatttgaaacactctttttgtagtatctggaagtggacatttggagcgctttcaggcctatgttgaaaaaggatatatcttcccataaaaactagacggaagcattctcagaaacttatttgtgatgtgtttgctcaactaacaggattgaaccatcgttttgaaggagcagttttgaaacactgttttcgtggaatctgcaagtggatatttggctagctttgaggatttcgttggaaacgggattacatataaaaaggagacagcaccattctcagaaacttctttgtgctgtctgcattcaagtcacagagttgagcattccctttcatagagcaggttggaaacactctttttgtagtatctggatgaggacatttggagcgctttcaggcgtatggtgaaaaaggaaatatcttcccgtaaaaactagacagaagcattctcagaaatttatttgtgatgtgtgccctcaactaacagagttgaacctttcttttgatagagcagttttgaaacactctttttgtaaaatctgcaagaggatatttggatagctttgaggatttcgttgcaaacgggaatggcttcatataaactctagacagaagcattctcagaaacttcgttgggatgtttcgattgaagtcccagtgttgaacattcccttttatagagcaggttggaaacactctttctgcattccctggaagtggacatttggagcgctttcaggacgacggtgaaaatggaaatatcttccaagaaaatctagatagaagcaatgtcagcaaacttttatgtgatggatctactcagctaacagagttgaacctttcttttgagagagcagttttgcaacactctttttgtggaatatgcaagtggatattagggcagctttgaggatttcgttggaaacgggaatacatgtaaaaagcagacagcagcattctcagaaacttctttgtgatgtttgcattgaagtcacagagttgaacattccctttgagagagcaggtttgaaacacgccttttgtcatatctggaagtgtccattcggagcgcattcaggcttgtgttgaaaaaggaaatatcctcccataaaaactagacagaagcattctcagaaacttatctgtgatgtatgtactcaactaacagaactaaaccatcgttttgaaggagcagttttgaaacactctttttgcggaatctgcaagtggatatttggctagctgggaggatttcgttggaaacgggattacatacaaaaagcagacagcagcattctcagaaaacttctttgtgatgtttgcattcaagtcacagagttgaacattccctttcatagagcaggtttgaaacactctttttgtagtatctggatgtggacatttggatcgctttcaggcctatggtgaaaaaggaaatatcttcccatgaaaactagacagaagcattctcagaaacttatttgtgatgtgtgccctcaactgacagtgttgaacctttgttttgatagagcagttctgaaacacactttttgtaaaatctgcaagaggatatttggatagctttgaggatttcgttggaaacgggaatgtcttcatgtaaactctagacagaagcattctcagaaattgctttgggatgtttcaattgaagtcccagtgttgaacattccgtttcatagagcaggtttgaaacactctttttgtactatctggaagtggacatttggagcgctttcaggtctacggtgaaaaaggagatatcttccaataaaaactagatagaagcaatgtcagaacttttttcatgatgtatctactcagcaaacagagttgaacctttcttttgagagagcagttttgaaacactctttttgtggaatatgcaagtgggtattaggccagcttggaggatttcgttggaaacgggaatacgtataaaaagcagacagcagcattgtcagaaactactttgtgatgtttgcattcaagtcacagaattgaacactccctttcacagagcaggtttgaatcactctttttgtagtgtctgtaagtgaacatttggattgctttcaggcctaaggtgaaaaaggaaatatcttcccataaaaactagacagaagcattctcagaaacttgtttgtgatgtgtgccctctactgacagagttgaacctttctttgcaaagagcagttttgaaacactctttttgtagaatctgcaagaggatatttggatagctttgaggatttcttgggaaacgggaatgtcttcagataaactctagacagaagcattctcagaaactcctttgggatgtttcaattgaagtcacagtgttgaacattccctttcacagagcaggtttgaaacactctttttgtagtgtctataagtgaacatttggcgtgctttcaggcctaacgtgaaaaaggaaatatcttcccataaaaactagacagaagcattctcagaaacttgttcttgatgtgtcccctctactgacagagttgaacctttctttgcaaagagcagctttgaaacactctttttgtagaatctgcaagaggatatttggatagcttggaggatttcgttggaaacgggtatgtcttcagataaactctagacagaaccattctcagaaacttctttgggatgttgcattcaagtcacagagtagaacattcccattcatagagcagatttgaaacactctttttgtagtatctggaagtggacatttggagcgctttcaggcctatgttgaaaaaggaaatatcttcccataaaaactagacggaagcattctcagaaacttatttgtgatgtgtttgctcaactaacaggtattgaaccatcgttttgaaggagcagttttgaaacactgttttcgtggaatctgcaagtggatatttggctagctttgaggatttcgttggaaacgggattacatataaaaaggagacagcagcattctcagaaacttctttgtgatgtttgcattcaagtcacagagttgaacattccctttcatagagcaggtttgaaacactctttttgtagtatctggatgtggacatttggatcgctttcaggcctatggtgaaaaaggaaatatcttcccatgaaaactagacagaagcattctcagaaacttatttgtgatgtgtgccctcaactgacagtgttgaacctttgttttgatagagcagttctgaaacacactttttgtaaaatctgcaagaggatatttggatagctttgaggatttcgttggaaacgggaatgtcttcatgtaaactctagacagaagcattctcagaaactgctttgggatgtttcaattgaagtcccagtgttgaacattcccattcatagagcaggtttgaaacactctttttgtactatctggaagtggacatttggagcgctttcaggtctacggtgaaaaaggagatatcttccaataaaaactagatagaagcaatgtcagaacttttttcatgatgtatctactcagctaacagagttgaacctttcttttgagagagcagttttgaaacactctttgtgtggaatatgcaagtgggtattaggccagcttggaggatttcgttggaaacgggaatacgtataaaaagcagacagcagcattgtcagaaactactttgtgatgtttgcattcaagtcacagaattgaacactccctttcacagagcaggtttgaaacactctttttgtagtgtctgtaagtgaacatatggattgctttcaggcctaaggtgaaaaaggaaatatcttcccataaaaactagacagaagcattctcagaaacttgtttgtgatgtgtgccctctactgacagagttgaacctttctttgcaaagagcagttttgaaacactctttttgtagaatatgcaagaggatatttggatagctttgaggatttcttgggaaacgggaatgtcttcagataaactctagacagaagcattctcagaaacttctttgggatgtttcaattgaagtcacagtgttgaacattccctttcacagagcaggtttcaaacactctttttgtagtgtctataattgaacatttggcgtgctttcaggcctaacgtgaaaaaggaaatatcttcccataaaaactagacagaagcattctgagaaacttgttcgtgatgtgtgccctctactgacagagttgaacctttctttgcaaagagcagctttgaaacactctttttgtagaatctgcaagaggatatgtggatagctttgaggatttcgttggaaacgggtatgtcttcagataaactctagacagaagcattctcagaaacttctttgggatgtttcaattgaagtcacagtgttgaacattccctttcacagagcaggtttgaaacactctttttgtagtgactataagtgaacatttggcgtgctttcaggcctaacgtgaaaaaggaaatatcttcccataaaaactagacagaagcattctcagaaacttgttcatgatgtgtgccctctactgacagagttgaacctttctttgcaaagagcagctttgaaacactctttttgtagaatctgcaagaggatatttggatagcttggaggatttcgttggaaacgggtatgtcttcagataaactctagacagaagcattctcagaaacttctttgggatgttgcattcaagtcacagagtagaacattcccattcatagagcagatttgaaacactctttttgtagtatctggaagtggacatttggagcgctttcaggcctatgttgaaaaaggaaatatcttcccataaaaactagacggaagcattctcagaaacttacttgtgatgtgtttgctcaactaacagaattgaaccatcgttttgaaggagcagttttgaaacactgttttcgtggaatctgcaagtggatatttggctagctttgaggatttcgttggaaacgggattacatatacaaaggagacagcagcattctcagaaacttctttgtgatgtttgcattcaagtcacagagttgaacattccctttcatagagcaggtttgaaacactctttttgtagtatctggatgtggacatttggatcgctttcaggcctatggtgaaaaaggaaatatcttcccatgaaaactagacagaatcattctcagaaacttatttgtgatgtgtgccctcaactgacagtgttgaacctttgttttgatagagcagttctgaaacacactttttgtaaaatctgcaagaggatatttggatagctttgaggatttcgttggaaacgggaatgtcttcatgtaaactctagacagaagcattctcagaaactgctttgggatgtttcaattgaagtcccagtgttgaacattccctttcatagagcaggtttgaaacactctttttgtagtatctggaagtggacatttggagcgctttcaggtctacggtgaaaaaggagatatcttccaataaaaactagatagaagcaatgtcagaacttttttcatgatgtatctactcagcaaacagagttgaacctttcttttgagagagcagttttgaaacactctttttgtggaatatgcaagtgggtattaggccagcttggaggatttcgttggaaacgggaatacgtataaaaagcagacagcagcattgtcagaaactactttgtgatgtttgcattcaagtcacagaattgaacactccctttcacagagcaggttagaaacactctttttgtagtgtctgtaagtgaacatttggattgctttcaggcctaaggtgaaaaaggaaatatcttcccataaaaactagacagaagcattctcagaaacttgtttgtgatgtgtgccctctactgacagagttgaacctttctttgcaaagagcagttttgaaacactctttttgtagaatctgcaagaggatatttggatagctttgaggatttcttgggaaacgggaatgtcttcagataaactctagacagaagcattctcagaaacttctttgggatgtttcaattgaagtcacagtgttgaacattccctttcacagagcaggtttgaaacactctttttgtagtgtctataagtgaacatttggcgtgctttcagggcctaacgtgaaaaaggaaatatcttcccataaaaactagacagaagcattctcagaaacttgttcttgatgtgtcccctctactgacagagttgaacctttctttgcaaagagcagctttgaaacactctttttgtagaatctgcaagaggatatttggatagcttggaggatttcgttggaaacgggtatgtcttcagataaactctagacagaagcattctcagaaacttctttgggatgttgcattcaagtcacagagtagaacattcccattcatagagcagatttgaaacactctttttgtagtatctggaagtggacatttggagcgctttcaggcctatgttgaaaaaggaaatatcttcccatcaaaactagacggaagcattctcagaaacttacttgtgatgtgtttgctcaactaacagaattgaaccatcgttttgaaggagcagttttgaaacactgttttcgtggaatctgcaagtggatatttggctagctttgaggatttcgttggaaacgggattacatataaaaaggagacagcagcattctcagaaacttctttgtgatgtctgcattcaattcacagagttgagcattccctttcatagagcaggttggaaacactctttttgtagtatctggatgaggacatttggagcgctttcaggcctatggtgaaaaaggaaatatcttcccgtaaaaactagacagaagcattctcagaaatttatttgtgatgtgtgccctcaactaacagagttgaacctttcttttgatagagcagttttgaaacactctttttgtaaaatctgcaagaggatatttggatagctttgaggatttcgttgcaaacgggaatggcttcatataaactctagacagaagcattctcagaaacttcgttgggatgtttcgattgaagtcccagtgttgaacattcccttttatagagcaggttggaaacactctttctgcattccctggaagtggacatttggagccctttcaggacgacggtgaaaatggaaatatcttccaagaaaatctagatagaagcaacgtcagaaacttttctgtgatggatctactcagctaacagagttgaacctttcttttgagagagcagttttgcaacactctttttgtggaatatgcaagtggatattagggcagctttgaggatttcgttggaaacgggaatacatgtaaaaagcagacagcagcattctcagaaacttctttgtgatgtttgcattgaagtcacagagttgaacattccctttgagagagcaggtttgaaacacgccttttgtcatatctggaagtgtccattcggagcgcattcaggcttgtgttgaaaaaggaaatatcctcccataaaaactagacagaagcattctcagaaacttatctgtgatgtatgtactcaactaacagaactaaaccatcgttttgaaggagcagttttgaaacactctttttgcggaatctgcaagtggatatttggctagctgggaggatttcgttggaaacgggattacatacaaaaagcagacagcagcattttcagaaactactttgtgatgtttgcattcaagtcacagagttgaacattccctttcatacagcaggtttgaaacactctttttgtagtatctggatgtggacatttggatcgctttcaggcctatggtgaaaaaggaaatatcttcccatgaaaactagacagaagcattctcagaaacttatttgtgatgtgtgccctcaactgacagtgttgaacctttgttttgatagagcagttctgaaacacactttttgtaaaatctgcaagaggatatttggatagctttgaggatttcgttggaaacgggaatgtcttcatgtaaactctagacaggaagcattctcagaaactgctttgggatgtttcaattgaagtcccagtgttgaacattcccattcatagagcaggtttgaaacactctttttgtactatctggaagtggacatttggagcgctttcaggtctacggtgaaaaaggagatatcttccaataaaaactagatagaagcaatgtcagaacttttttcatgatgtatctactcagcaaacagagttgaacctttcttttgagagagcagttttgacactgtctttgtggaatatgcaagtgggtattaggccagcttggaggatttcgttggaaacgggaatacgtataaaaagcagacagcagcattgtcagaaactactttgtgatgtttgcattcaagtcacagaattgaacactccctttcacagagcaggtttgaaacactctttttgtagtgtctgtaagtgaacatatggattgctttcaggcctaaggtgaaaaaggaaatatcttcccataaaaactagacagaagcattctcagaaacttgtttgtgatgtgtgccctctactgacagagttgaacctttctttgcaaagagcagttttgaaacactctttttgtagaatctgcaagaggatatttggatagctttgaggatttcttgggaaacgggaatgtcttcagataaactctagacagaagcatactcagaaacttctttgggacgtttcaattgaagtcacagtgttgaacattccctttcacagagcaggtttgaaacactctttttgtagtgtctataagtgaacatttggcgtgctttcaggcctaacgtgaaaaaggaaatatcttcccataaaaactagacagaagcattctcagaaacttgttcgtgatgtgtgccctctactgacagagttgaacctttctttgcaaagagcagctttgaaacactctttttgtagaatctgcaagaggatatttggatagctttgaggatttcgttggaaacgggtatgtcttcagataaactctagacagaagcattctcagaaacttctttgggatgttgcattcaagtcacagagtagaacattcccattcatagagcagatttgaaacactctttttgtagtatctggaagtggacatttggagcgctttcaggcctatgttgaaaaaggaaatatcttcccataaaaactagacggaagcattctcagaaacttatttgtgatgtgtttgctcaactaacaggattgaaccatcgttttgaaggagcagttttgaaacactgttttcgtggaatctgcaagtggatatttggctagctttgaggatttcgttggaaacgggattacatataaaaaggagacagcagcattctcagaaacttctttgtgatgtctgcattcaattcacagagttgagcattccctttcctagagcacgttggaaacactctttttgtagtatctggatgaggacatttggagcgctttcaggcgtatggtgaaaaaggaaatatcttcccgtaaaaactagacagaagcattctcagaaatttatttgtgatgtgtgccctcaactaacagagttgaacctttcttttgatagagcagttttgaaacactctttttgtaaaatctgcaagaggatatttggatagctttgaggatttcattgcaaacgggaatggcttcatataaactctagacagaagcattctcagaaacttcgttgggatgtttcgattgaagtcccagtgttgaacattcccttttatagagcaggttggaaacactctttctgcattccctggaagtggacctttggagcgctttcaggacgacggtgaaaatggaaatatcttccaataaaatctagatagaagcaacgtcagaaacttttatgtgatggatctactcagctaacagagttgaacctttcttttgagagagcagttttgcaacactctttttgtggaatatgcaagtggatattagggcagctttgaggatttcgttggaaacgggaatacatgtaaaaagcagacagcagcattctcagaaacttctttgtgatgtttgcattgaagtcacagagttgaacattccctttgagagagcaggtttgaaacacgccttttgtcatatctggaagtgtccattcggagcgcattcaggcttgtgttgaaaaaggaaatatcctcccataaaaactagacagaagcattctcagaaacttatctgtgatgtatgtactcaactaacagaactaaaccatcgttttgaaggagcagttttgaaacactctttttgcggaatctgcaagtggatatttggctagctgggaggatttcgttggaaacgggattacatacaaaaagcagacagcagcattctcagaaacttctttgtgatgtttgcattcaagtcacagagttgaacattccctttcatagagcaggtttgaaacactctttttgtagtatgtggatgtggacatttggatcgctttcaggcctatggtgaaaaaggaaatatcttcccatgaaaactagacagaagcattctcagaaacttatttgtgatgtgtgccctcaactgacagtgttgaacctttgttttgatagagcagttctgaaacacactttttgtaaaatctgcaagaggatatttggatagctttgaggatttcgttggaaacgggaatgtcttcatgtaaactctagacagaagcattctcagaaactgctttgggatgtttcaattgaagtcccagtgttgaacattcccattcatagagcaggtttgaaacactctttttgtactatctggaagtggacatttggagcgctttcaggtctacggtgaaaaaggagatatcttccaataaaaactagatagaagcaatgtcagaacttttttcatgatgtatctactcagcaaacagagttgaacctttcttttgagagagcagttttgacactgtctttgtggaatatgcaagtgggtattaggccagcttggaggatttcgttggaaacgggaatacgtataaaaagcagacagcagcattgtcagaaactactttgtgatgtttgcattcaagtcacagaagtgaacactccctttcacagagcaggtttgaaacactctttttgtagtgtctgtaagtgaacatttggattgctttcaggcctatggtgaaaaaggaaatatcttcccataaaaactagacagaagcattctcagaaacttgtttgtgatgtgtgccctctactgacagagttgaaactttctttgcaaagagcagttttgaaacactctttttgtagaatctgcaagaggatatttggatagctttgaggatttcctgggaaacgggaatgtcttcagataaactctagacagaagcattctcagtaaacttctttgggatgtttcaattgaagtcacagtgttgaacattccctttcacagagcaggtttgaaacactctttttgtagtgtctataagtgaacatttggcgtgctttcaggcgtaacgtgaaaaaggaaatatcttcccataaaaactagacagaagcattctcagaaacttgttcgtgatgtgtgccctctactgacagagttgaacctttctttgcaaagagcagctttgaaacactctttttgtagaatctgcaagaggatatttggatagctttgaggatttcgttggaaacgggtatgtcttcagataaactctagacagaagcattctcagaaacttctttgggatgttgcattcaagtcacagagtagaacattcccattcatagagcagatttgaaacactctttttgtagtatctggaagtggacatttggagcgctttcaggcctatgttgaaaaaggaaatatcttcccataaaaactagacggaagcattctcagaaacttaattgtgatgtgtttgctcaactaacaggattgaaccatcgttttgaaggagcagttttgaaacactgttttcgtggaatctgcaagtggatatttggctagctttcaggatttcgttggaaacgggattacctataaaaaggagacagcagcattctcagaaacttctttgtgatgtctgcattcaattcacagagttgagcattccctttcatagagcaggttggaaacactctttttgtagtatctggatgaggacatttggagcgctttcaggcgtatggtgaaaaaggaaatatcttcccgtaaaaactagacagaagcattctcagaagtttatttgtgatgtgtgccctcaactaacagagttgaacctttcttttgatagagcagttttgaaacactctttttgtaaaatctgcaaaaggatatttggatagctttgaggatttcgttgcaaacgggaatggcttcatataaactctagacagaagcattctcagaaacttcgttgggatgtttcgattgaagtcccagtgttgaacattcccttttatagagcaggttggaaacactctttctgcattccctggaagtggacatttggagcgctttcaggacgacggtgaaaatggaaatatcttccaagaaaatctagatagaagcaatgtcagaaacttttatgtgatggatctactcagctaacagagttgaacctttcttttgagagagcagttttgcaacactctttttgtggaatatgcaagtggatattagggcagctttgaggatttcgttggaaacgggaatacatgtaaaaagcagacagcagcattctcagaaacttctttgtgatgtttgcattgaagtcacagagttgaacattccctttgagagagcaggtttgaaacacgccttttgtcatatctggaagtgtccattcggagcgcattcaggcttgtgttgaaaaaggaaatatcctcccataaaaactagacagaagcattctcagaaacttatctgtgatgtatgtactcaactaacagaactaaaccatcgttttgaaggagcagttttgaaacactctttttgcggaatctgcaagtggatatttggctagctgggaggatttcgttggaaacgggattacatacaaaaagcagacagcagcattctcagaaacttatttgtgatgtgtgccctcaactgacagtgttgaacctttgttttgatagagcagttctgaaacacactttttgtaaaatctgcaagaggatatttggatagctttgaggatttcgttggaaacgggaatgtcttcatgtaaactctagacagaagcattctcagaaactgctttgggatgtttcaattgaagtcccagtgttgaacattcccattcatagagcaggtttgaaacactctttttgtactatctggaagtggacatttggagcgctttcaggtctacggtgaaaaaggagatatcttccaataaaaactagatagaagcaatgtcagaacttttttcatgatgtatctactcagctaaccgagttgaacctttcttttgagagagcagttttgaaacactctttttgtggaatatgcaagtgggtattaggccagcttggaggatttcgttggaaacgggaatacgtataaaaagcagacagcagcattgtcagaaactactttgtgatgtttgcattcaagtcacagaattgaacactccctttcacagagcaggtttgaaacactctttttgtagtgtctgtaagtgaacatttggattgctttcaggcctaaggtgaaaaaggaaatatcttcccataaaaactagacagaagcattctcagaaacttgtttgtgatgtgtgccctctactgacagagttgaacctttctttgcaaagaccagttttgaaacactctttttgtagaatctgcaagaggatatttggatagctttgaggatttacttgggaaacgggaatgtcttcagataaactctagacagaagcattctcagaaacttctttgggatgtttcaattgaagtcacagtgttgaacattccctttcacagagcaggtttgaaatactctttttgtagtgtctataagtgaacatttggcgtgctttcaggcgtaacgtgaaaaaggaaatatcttcccataaaaactagacagaagcattctcagaaacttgttcgtgatgtgtgccctctactgacagagttgaacctttctttacaaagagcagctttgaaacacactttttgtagaatctgcaagaggatatttggatagctttgaggatttcgttggaaacgggtatgtcttcagataaactctagacagaagcattctcagaaacttctttgggatgttgcattcaagtcacagagtagaacattcccattcatagagcagatttgaaacactctttttgtagtatctggaagtggacatttggagcgctttcaggcctatgttgaaaaaggaaatatcttcccataaaaactagacggaagcattctcagaaacttatttgtgatgtgtttgctcaactaacaggattgaaccatcgttttgaaggagcagttttgaaacactgttttcgtggaatctgcaagtggatatttggctagctttgaggatttcgttggaaacgggattacatatacaaaggagacagcagcattctcagaaacttctttgtgatgtctgcattcaagtcacagagttgagcattcccgttcatagagcaggttggaaacactctttttgtagtatctggatgaggacatttggagcgctttcaggcctatggtgaaaaaggaaatatcttcccgtaaaaactagacagaagcattctcagaaatttatttgtgatgtgtgccctcaactaacagagttgaacctttcttttgatagagcagttttgaaacactctttttgtaaaatctgcaagaggatatttggatagctttgaggatttcgttgcaaacgggaatggcttcatataaactctagacagaagcattctcagaaacttcgttgggatgtttcgattgaagtcccagtgttgaacattcccttttatagagcaggttggaaacactctttctgcattccctggaagtggacctttggagcgctttcaggacgacggtgaaaatggaaatatcttccaataaaatctagatagaagcaacgtcagaaacttttatgtgatggatctactcagctaacagagttgaacctttcttttgagagagcagttttgcaacactctttttgtggaatatgaaagtggatattagggcagctttgaggatttcgttggaaacgggaatacatgtaaaaagcagacagcagcattctcagaaacttctttgtgatgtttgcattgaagtcacagagttgaacattctctttgagagagcaggtttgaaacacgccttttgtcatatctggaagtgtccattcggagcgcattcaggcttgtgttgaaaaaggaaatgtcctcccataaaaactagacagaagcattctcagaaacttatctgtgatgtatgtactcaactaacagaactaaaccatcgttttgaaggagcagttttgaaacactctttttgcggaatctgcaagtggatatttggctagctgggaggatttcgttggaaacgggattacatacaaaaagcagacagcagcattctcagaaacttatttgtgatgtgtgccctcaactgacagtgttgaacctttgttttgatagagcagttctgaaacacactttttgtaaaatctgcaagaggatatttggatagctttgaggatttcgttggaaacgggaatgtcttcatgtaaactctagacagaagcattctcagaaactgctttgggatgtttcaattgaagtcccagtgttgaacattcccattcatagagcaggtttgaaacactctttttgtactatctggaagtggacatttggagcgctttcaggtctacggtgaaaaaggagatatcttccaataaaaactagatagaagcaatgtcagaacttttttcatgatgtatctactcagcaagcagagttgaacctttcttttgagagagcagttttgaaacactctttttgtggaatatgcaagtgggtattaggccagcttggaggatttcgttggaaacgggaatacgtataaaaagcagacagcagcattgtcagaaactactttgtgatgtttgcattcaagtcacagaattgaacactccctttcacagagcaggtttgaaacactctttttgtagtgtctgtaagtgaacatatggattgctttcaggcctaaggtgaaaaaggaaatatcttcccataaaaactagacagaagcattctcagaaacttgtttgtgatgtgtgccctctactgacagagttgaacctttctttgcaaagagcagttttgaaacactctttttgtagaatctgcaagaggatatttggatagctttgaggatttcttgggaaacgggaatgtgttcagataaactctagacagaagcattctcagaaacttctttgggatgtttcaattgaagtcacagtgttgaacattccctttcacagagcaggtttgaaacactctttttgtagtgtctataattgaacatttggagtgctttcaggcctaacgtgaaaaaggaaatatcttcccataaaaactagacagaagcattctcagaaacttgttcgtgatgtgtgccctctactgacagagttgaacctttctttgcaaagagcagctttgaaacactctttttgtagaatctgcaagaggatatgtggatagctttgaggatttcgttggaaacgggtatgtcttcagataaactctagacagaagcattctcagaaacttctttgggatgtttcaattgaagtcacagtgttgaacattccttttcacagagcaggtttgaaacactctttttgtagtgtctataagtgaacatttggcgtgctttcaggcctaacgtgaaaaaggaaatatcttcccataaaaactagacagaagcattctcagaaacttgttcttgatgtgtcccctctactgacagagttgaacctttctttgcaaagagcagctttgaaacactctttttgtagaatctgcaagaggatatttggatatcttggaggatttcgttggaaacgggtatgtcttcagataaactctagacagaagcattctcagaaacttctttgggatgttgcattcaagtcacagagtagaacattcccattcatagagcagatttgaaacactctttttgtagtatctggaagtggacatttggagcgctttcaggcctatgttgaaaaaggaaatatcttcccataaaaactagacggaagcattctcagaaacttatttgtgatgtgtttgctcaactaacaggattgaaccatcgttttgaaggagcagttttgaaacactgttttcgtggaatctgcaagtggatatttggctagctttgaggatttcgttggaaacgggattacatataaaaaggagacagcagcattctcagaaacttctttgtgatgtctgcattcaattcacagagttgagcattccctttcatagagcacgttggaaacactctttttgtagtatctggatgaggacatttggagcgctttcaggcctatggtgaaaaaggaaatatcttcccgtaaaaactagacagaagcattctcagaagtttatttctgatgtgtgccctcaactaacagagttgaacctttcttttgatagagcagttttgaaacactctttttgtaaaatctgcaagaggatatttggatagctttgaggatttcgttgcaaacgggaatggcttcatataaactctagacagaagcattctcagaaacttcgttgggatgtttcgattgaagtcccagtgttgaacattcccattcatagagcaggtttgaaacactctttttgtactatctggaagtggacatttggagcgctttcaggtctacggtgaaaaaggagatatcttccaataaaaactagatagaaacaatgtcagaacttttttcatgatgtatctactcagcaaacagagttgaacctttcttttgagagagcagttttgaaacactctttttgtggaatatgcaagtgggtattaggccagcttggaggatttcgttggaaacgggaatacgtataaaaagcagacagcagcattgtcagaaactactttgtgatatttgcattcaagtcacagaattgaacactccctttcacagagcaggtttgaaacactctttttgtagtgtctgtaagtgaacatttggattgctttcaggcctaaggtgaaaaaggaaatatcttcccataaaaactagacagaagcattctcagaaacttgtttgtgatgtgtgccctctactgacagagttgaacctttctttgcaaagagcagttttgaaacactctttttgtagaatctgcaagaggatatttggatagctttgaggatttcttgggaaacgggaatgtcttcagataaactctagacagaagcattctcagaaactgctttgggatgtttcaattgaagtcccagtgttgaacattccctttcatagagcaggtttgaaacactctttttgtactatctggaagtggacatttggagcgctttcaggtctacggtgaaaaaggagatatcttccaataaaaactagatagaagcaatgtcagaacttttttcatgatgtatctactcagcaaacagagttgaacctttcttttgagagagcagttttgaaacactctttttgtggaatatgcaagtgggtattaggccagcttggaggatttcgttggaaacgggaatacgtataaaaagcagacagcagcattgtcagaaactactttgtgaggtttgcattcaagtcacagaattgaacactccctttcacagagcatgtttgaaacactctttttgtagtgtctgtaagtgaacatttggattgctttcaggcctaaggtgaaaaaggaaatatcttcccataaaaactagacagaagcattctcagaaacttgtttgtgatgtgtgccctctactgacagagttgaacctttctttgcaaagagcagttttgaaacactctttttgtagaatctgcaagaggatatttggatagctttgaggatttcttgggaaacgggaatgtcttcagataaactctagacagaagcattctcagaaacttctttgggatgtttcaattgaagtcacagtgttgaacattccctttcacagagcaggtttgaaacactctttttgtagtgtctataattgaacatttggcgtgctttcaggcctaacgtgaaaaaggaaatatcttcccataaaaactagacagaagcattctcagaaacttgttcgtgatgtgtgccctctactgacagagttgaacctttctttgcaaagagcagctttgaaacactctttttgtagaatctgcaagaggatatgtggatagcttggaggatttcgttggaaacgggtatgtcttcagataaactctagacagaagcattctcagaaagttctttgggatgtttcaattgaagtcacagtgttgaacattccctttcacagagcaggtttgaaacactctttttgtagtgtctataagtgaacatttggcgtgctttcaggcctaacgtgaaaaaggaaatatcttcccataaaaactagacagaagcattctcagaaacttgttcatgatgtgtgccctctactgacagagttgaacctttctttgcaaagagcagctttgaaacactctttttgtagaatctgcaagaggatatttggatagcttggaggatttcgttggaaacgggtatgtcttcagataaactctagacagaagcattctcagaaacttctttgggatgttgcattcaagtcacagagtagaacattcccattcatagagcagatttgaaacactctttttgtagtatctggaagtggacatttggagcgctttcaggcctatgttgaaaaaggaaatatcttcccataaaaactagacggaagcattctcagaaacttatttgtgatgtgtttgctcaactaacaggattgaaccatcgttttgaaggagcagttttgaaacactgttttcgtggaatctgcaagtggatatttggctagctttgaggatttcgttggaaacgggattacatataaaaaggagacagcagcattctcagaaacttctttgtgatgtctgcattcaattcacagagttgagcattccctttcatagagcaggttggaaacactctttttgtagtatctggatgaggacatttggagcgctttcaggcgtatggtgaaaaaggaaatatcttcccgtaaaaactagacagaagcattctcagaagtttatttgtgatgtgtgccctcaactaacagagttgaacctttcttttgatagagcagttttgaaacactctttttgtaaaatctgcaagaggatatttggatagctttgaggatttcgttgcaaacgggaatggcttcatataaactctagacagaagcattctcagaaacttcgttgggatgtttcgattgaagtcccagtgttgaacattcccttttatagagcaggttggaaacactctttctgcattccctggaagtggacatttggagcgctttcaggacgacggtgaaaatggaaatatcttccaataaaatctagatagaagcaacgtcagaaacttttatgtgatggatctactcagctaacagagttgaacctttcttttgagagagcagttttgcaacactctttttgtggaatatgcaagtggatattagggcagctttgaggatttcgttggaaacgggaatacatgtaaaaagcagacagcagcattctcagaaacttctttgtgatgtttgcattgaagtcacagagttgaacattccctttgagagagcaggtttgaaacacgccttttgtcatatctggaagtgtccattcggagcgcattcaggcttgtgttgaaaaaggaaatatcctcccataaaaactagacagaagcattctcagaaacttatctgtgatgtatgtactcaactaacagaactaaaccatcgttttgaaggagcagttttgaaacactctttttgcggaatctgcaagtggatatttggctagctgggaggatttcgttggaaacgggattacatacaaaaagcagacagcagcattctcagaaacttatttgtgatgtgtgccctcaactgacagtgttgaacctttgttttgatagagcagttctgaaacacactttttgtaaaatctgcaagaggatatttggatagctttgaggatttcgttggaaacgggaatgtcttcatgtaaactctacacagaagcattctcagaaactgctttgggatgtttcaattgaagtcccactgttgaacattccctttcatagagcaggtttgaaacactctttttgtactatctggaagtggacatttggagcgctttcaggtctacggtgaaaaaggagatatcttccaataaaaactagatagaagcaatgtcagaacttttttcatgatgtatctactcagcaaacagagttgaacctttcttttgagagagcagttttgaaacactctttttgtggaatatgcaagtgggtattaggccagcttggaggatttcgttggaaacgggaatacgtataaaaagcagacagcagcattgtcagaaactactttgtgatgtttgcattcaagtcacagtaattgaacactccctttcacagagcaggtttgaaacactctttttgtagtgtctgtaagtgaacatttggattgctttcaggcctaaggtgaaaaaggaaatatcttcccataaaaactagacagaagcattctcagaaacttgtttgtgatgtgtgccctctactgacagagttgaacctttctttgcaaagagcagctttgaaacactctttttgtagaatctgcaagaggatatttggatagctttgaggatttcttgggaaacgggaatgtcttcagataaactctagacagaagcattctcagaaacttctttgggatgtttcaattgaagtcacagtgttgaacattccctttcacagagcaggtttgaaacactctttttgtagtgtctataagtgaacatttggcgtgctttcaggcctaacgtgaaaaaggaaatatcttcccataaaaactagacagaagcattctcagaaacttgtttgtgatgtgtgccctctactgacagagttgaacctttctttgcaaagagcagttttgaaacactctttttgtagaatgtgcaagaggatatttggatagatttgaggatttcttgggaaacgggaatgtcttcagataaactctagacagaaacattctcagaaacttctttgggatgttgcattcaagtcacagagtagaacattcccatgcatagagcagatttgaaacactctttttgtagtatctggaagtggacatttggagcgctttcaggcctatgttgaaaaaggaaatatcttcccataaaaactagacgggaagcattctcagaaacttatttgtgatgtgtttgctcaactaacaggattgaaccatcgttttgaaggagcagttttgaaacactgttttcgtggaatctgcaagtggatatttggctagctttgaggatttcgttggaaacgggattacatataaaaaggagacagcagcattctcagaaacttctttgtgatgtctgcattcaagtcacagagttgagcattccctttcatagagcaggttggaaacactctttttgtagtatctggatgaggacatttggagcgctttcaggcgtatggtgaaaaaggaaatatcttcccgtaaaaactagacagaagcattctcagaaatttatttgtgatgtgtgccctcaactaacagagttgaacctttcttttgatagagcagttttgaaacactctttttgtaaaatctgcaagaggatatttggatagctttgaggatttcgttgcaaacgggaatggcttcatataaactctagacagaagcattctcagaaacttcgttgggatgtttcgattgaagtcccagtgttgaacattcccttttatagagcaggttggaaacactctttctgcattccctggaagtggacatttggagcgctttcaggacgacggtgaaaatggaaatatcttccaagaaaatctagatagaagcaatgtcagaaacttttatgtgatggatctactcagctaacagagttgaacctttcttttgagagagcagttttgcaacactctttttgtggaatatgcaagtggatattagggcagctttgaggatttcgttggaaacgggaatacatataaaaagcagacagcagcattctcagaaacttctttgtgatgtttgcattgaagtcacagagttgaacattccctttgagagagcaggtttgaaacacgccttttgtcatatctggaagtgtccattcggagcgcattcaggcttgtgttgaaaaaggaaatatcctcccataaaaactagacagaagcattctcagaaacttatctgtgatgtatgtactcaactaacagaactaaaccatcgttttgaaggagcagttttgaaacactctttttgcggaatctgcaagtggatatttggctagctgggaggatttcgttggaaacgggattacatacaaaaagcagagagcagcattctcagaaacttatttgtgatgtgtgccctcaactgacagtgttgaacctttgttttgatagagcagttctgaaacacactttttgtaaaatctgcaagaggatatttggatagctttgaggatttcgttggaaacgggaatgtcttcatgtaaactctagacagaagcattctcagaaactgctttgggatgtttcaattgaagtcccagtgttgaacattcccattcatagagcaggtttgaaacactctttttgtactatctggaagtggacatttggagcgctttcaggtctacggtgaaaaaggagatatcttccaataaaaactagatagaagcaatgtcagaacttttttcatgatgtatctactcagcaaacagagttgaacctttcttttgagagagcagttttgaaacactctttttgtggaatatgaaagtgggtattaggccagcttggaggatttcgttggaaacgggaatacgtataaaaagcagacagcagcattgtcagaaactactttgtgatgtttgcattcaagtcacagaattgaacactccctttcacagagcaggtttgaaacactctttttgtagtgtctgtaagtgaacatatggattgctttcaggcctaaggtgaaaaaggaaatatcttcccataaaaactagacagaagcattctcagaaacttgtttgtgatgtgtgccctctactgacagagttgaacctttctttgcaaagaccagttttgaaacactctttttgtagaatctgcaagaggatatttggatagctttgaggatttcttgggaaacgggaatgtcttcagataaactctagacagaagcattctcagaaacttctttgggatatttcaattgaagtcacagtgttgaacattccctttcacagagcaggtttgaaacactctttttgtagtgtctataagtgaacatttggcgtgctttcaggcctaacgtgaaaaaggaaatatcttcccataaaaactagacagaagcattctcagaaacttgttcgtgatgtgtgccctctactgacagagttgaacctttctttgcaaagagcagctttgaaacactctttttgtagaatctgcaagaggatatttggatagctttgaggatttcgttggaaacgggtatgtcttcagataaactctagacagaagcattctcagaaacttctttgggatgttgcattcaagtcacagagtagaacattcccattcatagagcagatttgaaacactctttttgtagtatctggaagtggacatttggagcgctttcaggcctatgttgaaaaaggaaatatcttcccataaaaactagacggaagcattctcagaaacttatttgtgatgtgtttgctcaactaacaggattgaaccatcgttttgaaggagcagttttgaaacactgttttcgtggaatctgcaagtggatatttggctagctttgaggatttcgttggaaatgggattacatatacaaaggagacagcagcattctcagaaacttctttgtgatgtctgcattcaattcacagagttgagcattccctttcatagagcaggttggaaacactctttttgtagtatctggatgaggacatttggagcgctttctggcctatggtgaaaaaggaaatatcttcctgtaaaaactagacagaagcattctcagaaatttatttgtgatctgtgccctcaactaacagagttgaacctttcttttgatagagcagttttgaaacactctttttgtaaaatctgcaagaggatatttggatagctttgaggatttcgttgcaaacgggaatggcttcatataaactctagacagaagcattctcagaaacttctttgggatgtttcgattgaagtcccagtgttgaactttcccttttatagagcaggttggaaacactctttctgcattccctggaagtggacatttggagcgctttcaggacgacggtgaaaatggaaatatcttccaataaaatctagatagaagcaacgtcagaaacttttatgtgatggatctactcagctaacagagttgaacctttcttttgagagagcagttttgcaacactctttttgtggaatatgcaagtggatattagggcagctttgaggatttcgttggaaacgggaatacatgtaaaaagcagacagcagcattctcagaaacttctttgtgatgtttgcattgaagtcacagagttgaacattccctttgagagagcaggtttgaaacacgccttttgtcatatctggaagtgtccattcggagcgcattcaggcttgtgttgaaaaaggaaatatcctcccataaaaactagacagaagcattctcagaaacttatctgtgatgtatgtactcaactaacagaactaaaccatcgttttgaaggagcagttttgaaacactctttttgcggaatctgcaagtggatatttggctagctgggaggatttcgttggaaacgggattacatacaaaaagcagacagcagcattctcagaaacttatttgtgatgtgtgccctcaactgacagtgttgaacctttgttttgatagagcagttctgaaacacactttttgtaaaatctgcaagaggatatttggatagctttgaggatttcgttggaaacgggaatgtcttcatgtaaactctagacagaagcattctcagaaactgctttgggatgtttcaattgaagtcccagtgttgaacattccctttcatagagcaggtttgaaacactctttttgtactatctggaagtggacatttggagcgctttcaggtctacggtgaaaaaggagatatcttccaataaaaactagatagaagcaatgtcagaacttttttcatgatgtatctactcagcaaacagagttgaacctttcttttgagagagcagttttgaaacactctttttgtggaatatgcaagtgggtattaggccagcttggaggatttcgttggaaacgggaatacgtataaaaagcagacagcagcattgtcagaaactactttgtgatgtttgcattcaagtcacagaattgaacactccctttcacagagcaggtttgaaacactctttttgtagtgtctgtaagtgaacatatggattgctttcaggtctaaggtgaaaaaggaaatatcttcccataaaaactagacagaagcattctcagaaacttgtttgtgatgtgtgccctctactgacagagttgaacccttctttgcaaagagcagttttgaaacactctttttgtagaatctgcaagaggatatttggatagctttgaggatttcttgggaaacgggaatgtcttcagataaactctagacagaagcattctcagaaacttctttgggatatttcaattgaagtcacagtgctgaacattccctttcacagagcaggtttgaaacactctttttgtagtgtctataagtgaacatttggcgtgctttcaggcctaacgtgaaaaaggaaatatcttcccataaaaactagacagaagcattctcagaaacttgttcgtgatgtgtgccctctactgacagagttgaacctttctttgcaaagagcagctttgaaacactctttttgtagaatctgcaagaggatatttggatagctttgaggatttcgttggaaacgggtatgtcttcagataaactctagacagaagcattctcagaaacttctttgggatgttgcattcaagtcacagagtagaacattcccattcatagagcagatttgaaacactctttttgtagtatctggaagtggacatttggagcgctttcaggcctatgttgaaaaaggaaatatcttcccataaaaactagacggaagcattctcagaaacttatttgtgatgtgtttgctcaactaacaggattgaaccatcgttttgaaggagcagttttgaaacactgttttcgtggaatctgcaagtggatatttggctagctttgaggatttcgttggaaacgggattacatataaaaaggagacagcaagcattctcagaaacttctttgtgatgtctgcattcaattcacagagttgagcattccctttcatagagcaggttggaaacactctttttgtagtatctggatgaggacatttggagcgctttcaggcgtatggtgaaaaagaaaatatcttcccgtaaaaactagacagaaccattctcataaacttgtttatgatgtgtgtactcaactaacagagttgaacctttcttttgatagagcagttttgaaacactctttttttcattatactttaagtttttgggtacatgtgcacattgtgcaggttaattacatatgtctacatgtgccatgctggtggcactgccccccctaactcgtcatctagcattaggtgtatctcccaatgctatccctcccccctccccccaccccacaacagtccccagagtgtgatgttccccttcctgtgtccatgtgatctcattgttcaattcccacctatgagtgagaatatgcggtgtttggttttctgttcttgcgatnnnnnnnnnnnnnnnnnnnnnnnnnnnnnnnnnnnnnnnnnnnnnnnnnnnnnnnnnnnnnnnnnnnnnnnnnnnnnnnnnnnnnnnnnnnnnnnnnnnnagcattctcagaaacttcgttgggatgtttcgattgaagtcccagtgttgaacattcccttttatagagcaggttggaaacactctttctgcattccctggaagtggacatttggagcgctttcaggacgacggtgaaaatggaaatatcttccaagaaaatctagatagaagcaatgtcagaaacttttatgtgatggatctactcagctaacagagttgaacctttcttttgagagagcagttttgcaacactctttttgtggaatatgcaagtggatattagggcagctttgaggatttcgttggaaacgggaatacatgtaaaaagcagacagcagcattctcagaaacttctttgtgatgtttgcattgaagtcacagagttgaacattccctttgagagagcaggtttgaaacacgccttttgtcatatctggaagtgtccattcggagcgcattcaggcttgtgttgaaaaaggaaatatcctcccataaaaactagacagaagcattctcagaaacttatctgtgatgtatgtactcaactaacagaactaaaccatcgttttgaaggagcagttttgaaacactctttttgcggaatctgcaagtggatatttggctagctgggaggatttcgttggaaacgggattacatacaaaaagcagacagcagcattctcagaaacttatttgtgatgtgtgccctcaactgacagtgttgaacctttgttttgatagagcagttctgaaacacactttttgtaaaatctgcaagaggatatttggatagctttgaggatttcgttggaaacgggaatgtcttcatgtaaactctggacagaagcattctcagaaactgctttgggatgtttcaattgaagtcccagtgttgaacattccctttcatagagcaggtttgaaacactctttttgtactatctggaagtggacatttggagcgctttcaggtctacggtgaaaaaggagatatcttccaataaaaactagatagaagcaatgtcagaacttttttcatgatgtatctactcagcaaacagagttgaacctttcttttgagagagcagttttgaaacactccttttgtggaatatgcaagtgggtattaggccagcttggaggatttcgttggaaacgggaatacgtataaaaagcagacagcagcattgtcagaaactactttgtgatgtttgcattcaagtcacagaattgaacactccctttcacagagcaggtttgaaactctctttttgtagtgtctgtaagtgaacatttggattgctttcaggcctaaggtgaaaaaggaaatatcttcccataaaaactagacagaagcattctcagaaacttgtttgtgatgtgtgccctctactgacagagttgaacctttctttgcaaagagcagttttgaaacactctttttgtagaatctgcaagaggatatttggatagctttgaggatttcttgggaaacgggaatgtcttcagataaactctagacagaagcattctcagaaacttctttgggatgtttcaattgaagtcacagtgttgaacattccctttcacagagcaggtttgaaacactctttttgtagtgtctataagtgaacatttggcgtgctttcaggcgtaacgtgaaaaaggaaatatcttcccataaaaactagacagaagcattctcagaaacttgttcgtgatgtgtgccctctactgacagagttgaacctttctttgcaaagagcagctttgaaacacactttttgtagaatctgcaagaggatatttggatagctttgaggatttcgttggaaacgggtatgtcttcagataaactctagacagaagcattctcagaaacttctttgggatttgcatgcaagtcacagagtagaacattcccattcatagagcagatttgaaacactctttttgtagtatctggaagtggacatttggagcgctttcaggcctatgttgaaaaaggaaatatcttcccataaaaactagacggaagcattctcagaaacttaattgtgatgtgtttgctcaactaacaggattgaaccatcgttttgaaggagcagttttgaaacactgttttcgtggaatctgcaagtggatatttggctagctttgaggatttcgttggaaacgggattacatatacaaaggagacagcgcattctcagaaacttctttgtgatgtttgcattcaagtcacagagttgaacattccctttcatagagcaggtttgaaacactctttttgtagtatctggatgtggacatttggatcgctttcaggcctatggtgaaaaaggaaatatcttcccatgaaaactagacagaagcattctcagaaacttatttgtgatgtgtgccctcaactgacagtgttgaacctttgttttgatagagcagttctgaaacacactttttgtaaaatctgcaagaggatatttggatagctttgaggatttcgttggaaacgggaatgtcttcatgtaaactctagacagaagcattctcagaaactgctttgggatgtttcaattgaagtcccagtgttgaacattccctttcatagagcaggtttgaaacactctttttgtactatctggaagtggacatttggagcgctttcaggtctacggtgaaaaaggagatatcttccaataaaaactagatagaagcaatgtcagaacttttttcatgatgtatctactcagcaaacagagttgaacctttcttttgagagagcagttttgaaacactctttttgtggaatatgcaagtgggtattaggccagcttggaggatttcgttggaaacgggaatacgtataaaaagcagacagcagcattgtcagaaactactttgtgatgtttgcattcaagtcacagaattgaacactccctttcacagagcaggtttgaaacactctttttgtagtgtctgtaagtgaacatatggattgctttcaggcctaaggtgaaaaaggaaatatcttcccataaaaactagacagaagcattctcagaaacttgtttgtgatgtgtgccctctactgacagagttgaacctttctttgcaaagagcagttttgaaacactctttttgtagaatctgcaagaggatatttggatagctttgaggatttcttgggaaacgggaatgtcttcagataaactctagacagaagcattctcagaaacttctttgggatgtttcaattgaagtcacagtgttgaacattccctttcacagagcaggtttgaaacactctttttgtagtgtctataagtgaacatttggcgtgctttcaggcctaacgtgaaaaaggaaatatcttcccataaaaactagacagaagcattctcagaaacttgttcttgatgtgtcccctctactgacagagttgaacctttctttgcaaagagcagctttgaaacactctttttgtagaatctgcaagaggatatttggatagcttggaggatttcgttggaaacgggtatgtcttcagataaactctagacagaagcattctcagaaacttctttgggatgttgcattcaagtcacagagtagaacattcccattcatagagcagatttgaaacactctttttgtagtatctggaagtggacatttggagcgctttcaggcctatgttgaaaaaggaaatatcttcccataaaaactagacggaagcattctcagaaacttaattgtgatgtgtttgctcaactaacaggattgaaccatcgttttgaaggagcagttttgaaacactgttttcgtggaatctgcaagtggatatttggctagctttgaggatttcgttggaaacgggattacatataaaaaggagacagcagcattctcagaaacttctttgtgatgtctgcattcaattcacagagttgagcattccctttcatagagcaggttggaaacactctttttgtagtatctggatgaggacatttggagcgctttcaggcgtatggtgaaaaaggaaatatcttcccgtaaaaactagacagaagcattctcagaaatttatttgtgatgtgtgccctcaactaacagagttgaacctttcttttgatagagcagttttgaaacactctttttgtaaaatctgcaagaggatatttggatagctttgaggatttcattgcaaacgggaatggcttcatataaactctagacagaagcattctcagaaacttcgttgggatgtttcgattgaagtcccagtgttgaacattcccttttatagagcaggttggaaacactctttctgcattccctggaagtggacatttggagcgctttcaggacgacggtgaaaatggaaatatcttccaagaaaatctagatagaagcaatgtcagaaacttttatgtgatggatctactcagctaacagagttgaacctttcttttgagagagcagttttgcaacactctttttgtggaatatgcaagtggatattagggcagctttgaggatttcgttggaaacgggaatacatgtaaaaagcagacagcagcattctcagaaacttctttgtgatgtttgcattgaagtcacagagttgaacattccctttgagagagcaggtttgaaacacgccttttgtcatatctggaagtgtccattcggagcgcattcaggcttgtgttgaaaaaggaaatatcctcccataaaaactagacagaagcattctcagaaacttatctgtgatgtatgtactcaactaacagaactaaaccatcgttttgaaggagcagttttgaaacactctttttgcggaatctgcaagtggatatttggctagctgggaggatttcgttggaaacgggattacatacaaaaagcagacagcagcattctcagaaacttatttgtgatgtgtgccctcaactgacagtgttgaacctttgttttgatagagcagttctgaaacacactttttgtaaaatctgcaagaggatatttggatagctttgaggatttcgttggaaacgggaatgtcttcatgtaaactctggacagaagcattctcagaaactgctttgggatgtttcaattgaagtcccagtgttgaacattccctttcatagagcaggtttgaaaccctctttttgtactatctggaagtggacatttggagcgctttcaggtctacggtgaaaaaggagatatcttccaataaaaactagatagaagcaatgtcagaacttttttcatgatgtatctactcagcaaacagagttgaacctttcttttgagggagcagttttgaaacactatttttgtggaatatgcaagtgggtattaggccagcttggaggatttcgttggaaacgggaatacgtataaaaagcagacagcagcattgtcagaaactactttgtgatgtttgcattcaagtcacagaattgaacactccctttcacagagcaggtttgaaacactctttttgtagtgtctgtaagtgaacatatggattgctttcaggcctaaggtgaaaaaggaaatatcttcccataaaaactagacagaagcattctcagaaacttgtttgtgatgtgtgccctctactgacagagttgaacctttctttgcaaagagcagttttgaaacactctttttgtagaatctgcaagaggatatttggatagctttgaagatttcttgggaaacgggaatgtcttcagataaactctagacagaagcattctcagaaacttctttgggatgtttcaattgaagtcacagtgttgaacattccctttcacagagcaggtttgaaacactctttttgtagtgtccataagtgaacatttggcgtgctttcaggcctaacgtgaaaaaggaaatatcttcccataaaaactagacagaagcattctcagaaacttgttcatgatgtgtgccctctactgacagagttgaacctttctttgcaaagagcagctttgaaacactctttttgtagaatctgcaagaggatatttggatagctttgaggatttcgttggaaacgggtatgtcttcagataaactctagacagaagcattctcagaaacttctttgggatgttgcattcaagtcacagagtagaacattcccattcatagagcagatttgaaacactctttttgtagtatctggaagtggacatttggagcgctttcaggcctatgttgaaaaaggaaatatcttcccataaaaactagacggaagcattctcagaaacttatttgtgatgtgtttgctcaactaacaggattgaaccatcgttttgaaggagcagttttgaaacactgttttcgtggaatctgcaagtggatatttggctagctttgaggatttcgttggaaacgggattacatataaaaaggagacagcagcattctcagaaacttctttgtgatgtctgcattcaaatcacagagttgagcattccctttcatagagcaggttggaaacactctttttgtagtatctggatgaggacatttggagcgctttcaggcctatggtgaaaaaggaaatatcttcccgtaaaaactagacagaagcattctcagaaatttatttgtgatgtgtgccctcaactaacagagttgaacctttcttttgatagagcagttttgaaacactctttttgtaaaatctgcaagaggatatttggatagctttgaggatttcgttgcaaacgggaatggcttcatataaactctagacagaagcattctcagaaacttcgttgggatgtttcgattgaagtcccagtgttgaacattccctttcatagagcaggttggaaacactctttctgcattccctggaagtggacatttggagcgctttcaggacgacggtgaaaatggaaatatcttccaagaaaatctagatagaagcaacgtcagaaacttttctgtgatggatctactcagctaacagagttgaacctttcttttgagagagcagttttgcaacactctttttgtggaatatgcaagtggatattagggcagctttgaggatttcgttggaaacgggaatacatgtaaaaagcagacagcagcattctcagaaacttctttttgatgtttgcattgaagtcacagagttgaacattccctttgagagagcaggtttgaaacacgccttttgtcatatctggaagtgtccattcggagcgcattcaggcttgtgttgaaaaaggaaatatcctcccataaaaactagacagaagcattctcagaaacttatctgtgatgtatgtactcaactaacagaactaaaccatcgttttgaaggagcagttttgaaacactctttttgcggaatctgcaagtggatatttggctagctgggaggatttcgttggaaacgggattacatacaaaaagcagagagcagcattctcagaaacttatttgtgatgtgtgccctcaactgacagtgttgaacctttgttttgatagagcagttctgaaacacactttttgtaaaatctgcaagaggatatttggatagctttgaggatttcgttggaaacgggaatgtcttcatgtaaactctacacagaagcattctcagaaactgctttgggatgtttcaattgaagtcccagtgttgaacattcccattcatagagcaggtttgaaacactctttttgtactatctggaagtggacatttggagcgctttcaggtctacggtgaaaaaggagatatcttccaataaaaactagatagaagcaatgtcagaacttttttcatgatgtatctactcagcaaacagagttgaacctttcttttgagagagcagttttgaaacactctttttgtggaatatgaaagtgggtattaggccagcttggaggatttcgttggaaacgggaatacgtataaaaagcagacagcagcattgtcagaaactactttgtgatgtttgcattcaagtcacagaattgaacactccctttcacagagcaggtttgaaacactctttttgtagtgtctgtaagtgaacatatggattgctttcaggcctaaggtgaaaaaggaaatatcttcccataaaaactagacagaagcattctcagaaacttgtttgtgatgtgtgccctctactgacagagttgaacctttctttgcaaagagcagttttgaaacactctttttgtagaatctgcaagaggatatttggatagctttgaggatttcttgggaaacgggaatgtcttcagataaactctagacagaagcattctcagaaacttctttgggatgtttcaattgaagtcacagtgttgaacattccctttcacagagcaggtttgaaacactctttttgtagtgtctataagtgaacatttggcatgctttcaggcctaacgtgaaaaaggaaatatcttcccataaaaactagacagaagcattctcagaaacttgttcgtgatgtgtgccctctactgacagagttgaacctttctttgcaaagagcagctttgaaacactctttttgtagaatctgccagaggatatttggatagcttggaggatttcgttggaaacgggtatgtcttcagataaactctagacagaagcattctcagaaacttctttgggatgttgcattcaagtcacagagtagaacattcccattcatagagcagatttgaaacactctttttgtagtatctggaagtggacatttggagcgctttcaggcctatgttgaaaaaggaaatatcttcccataaaaactagacggaagcattctcagaaacttacttgtgatgtgtttgctcaactaacagaattgaaccatcgttttgaaggagcagttttgaaacactgttttcgtggaatctgcaagtggatatttggctagctttgaggatttcgttggaaacgggattacatataaaaaggagacagcagcattctcagaaacttctttgtgatgtctgcattcaattcacagagttcagcattccctttcatagagcaggttggaaacactctttttgtagtatctggatgaggacatttggagcgctttcaggcctatggtgaaaaaggaaatatcttcccgtaaaaactagacagaagcattctcagaaatttatttgtgatgtgtgccctcaactaacagagttgaacctttcttttgatagagcagttttgaaacactctttttgtaaaatctgcaagaggatatttggatagctttgaggatttcattgcaaacgggaatggcttcatataaactctagacagaagcattctcagaaacttcgttgggatgtttcgattgaagtcccagtgttgaacattcccttttatagagcaggttggaaacactctttctgcattccctggaagtggacatttggagcgctttcaggacgacggtgaaaatggaaatatcttccaagaaaatctagttagaagcaacgtcagaaacttttctgtgatggatctactcagctaacagagttgaacctttcttttgagagagcagttttgcaacactctttttgtggaatatgcaagtggatattagggcagctttgaggatttcgttggaaacgggaatacatgtaaaaagcagacagcagcattctcagaaacttctttgtgatgtttgcattgaagtcacagagttgaacattccctttgagagagcaggtttgaaacacgccttttgtcatatctggaagtgtccattcggagcgcattcaggcttgtgttgaaaaaggaaatatcctcccataaaaactagacagaagcattctcagaaacttctttgtgatgtttgcattcaagtcacagagttgaacattccctttcatagagcaggtttgaaacactctttttgtagtatctggatgtggacatttggattgctttcaggcctatggtgaaaaaggaaatttcttcccatgaaaactagacagaagaattctcagaaacttatttgtgatgtgtgccctcaactgacagtgttgaacctttgttttgatagagcagttctgaaacacactttttgtaaaatctgcaagaggatatttggatagctttgaggatttcgttggaaacgggaatgtcttcatgtaaactctagacagaagcattctcagaaactgctttgggatgtttcaattgaagtcccagtgttgaacattccctttcatagagcaggtttgaaacactctttttgtactatctggaagtggacatttggagcgctttcaggtctacggtgaaaaaggagatatcttccaataaaaactagatagaagcaatgtcagaacttttttcatgatgtatctactcagcaaacagagttgaacctttcttttgagagagcagttttgaaacactctttttgtggaatatgcaagtgggtattaggccagcttggaggatttcgttggaaacgggaatacgtataaaaagcagacagcagcattgtcagaaactactttgtgatgcttgcattcaagtcacagaattgaacactccctttcacagagcaggtttgaaacactctttttgtagtgtctgtaagtgaacatttggattgctttcaggcctaaggtgaaaaaggaaatatcttcccataaaaactagacagaagcactctcagaaacttgtttgtgatgtgtgccctctactgacagagttgaacctttctttgcaaagagcagttttgaaacactccttttgtagaatctgcaagaggatatttggatagctttgaggatttcttgggaaacgggaatgtcttcagataaactctagacagaagcattctcagaaacttctttgggatgtttcaattgaagtcacagtgttgaacattccctttcacagagcaggtttgaaacactctttttgtagtgtctataagtgaacatttggcgtgctttcaggcgtaacgtgaaaaaggaaatatcttcccataaaaactagacagaagcattctcagaaacttgttcgtgatgtgtgccctctactgacagagttgaacctttctttgcaaagagcagctttgaaacactctttttgtagaatctgcaagaggatatttggatagcttggaggatttcgttggaaacgggtatgtcttcagataaactctagacagaagcattctcagaaacttctttgggatgttgcattcaagtcacagagtagaacattcccattcatagagcagatttgaaacactctttttgtagtatctggaagtggacatttggagcgctttcaggcctatgttgaaagaggaaatatcttcccataaaaactagacggaagcattctcagaaacttacttgtgatgtgtttgctcaactaacagaattgaaccatcgttttgaaggagcagttttgaaacactgttttcgtggaatctgcaagtggatatttggctagctttgaggatttcgttggaaacgggattacatataaaaaggagacagcagcattctcagaaacttctttgtgatgtctgcattcaagtcacagagttgagcattccctttcatagagcaggttggaaacactctttttgtagtatctggatgaggacatttggagcgctttcaggcctatggtgaaaaaggaaatatcttcccgtaaaaactagacagaagcattctcagaaatttatttgtgatgtgtgccctcaactaacagagttgaacctttcttttgatagagcagttttgaaacactctttttgtaaaatctgcaagaggatatttggatagctttgaggatttccttgcaaacgggaatggcttcatataaactctagacagaagcattctcagaaacttcgttgggatgtttcgattgaagtcccagtgttgaacattcccttttatagagcaggttggaaacactctttctgcattccctggaagtggacatttggagcgctttcaggacgacggtgaaaatggaaatatcttccaagaaaatctagatagaagcaatgtcagaaacttttatgtgatggatctactcagctaacagagttgaacctttcttttgagagagcagttttgcaacactctttttgtggaatatgcaagtggatattagggcagctttgaggatttcgttggaaacgggaatacatgtaaaaagcagacagcagcattctcagaaacttctttgtgatgtttgcattgaagtcacagagttgaacattccctttgagagagcaggtttgaaacacgccttttgtcatatctggaagtgtccattcggagcgcattcaggcttgtgttgaaaaaggaaatatcctcccataaaaactagacagaaagcattctcagaaactgatttgtgatgtatgtactcaactaacagaactaaaccatcgttttgaaggagcagttttgaaacactctttttgcggaatctgcaagtggatatttggctagcttggaggatttcgttggaaacgggattacatacaaaaagcagacagcagcattctcagaaacttatttgtgatgtgtgccctcaactgatagtgttgaacctttgttttgatagagcagttctgaaacacactttttgtaaaatctgcaagaggatatttggatagctttgaggatttcgttggaaacgggaatgtcttcatgtaaactctagacagaagcattctcagaaactgctttgggatgtttcaattgaagtcccagtgttgaacattccctttcatagagcaggtttgaaacactctttttgtagtatctggatgaggacatttggagcgctttcaggcgtatggtgaaaaaggaaatatcttcccgtaaaaactagacagaagcattctcagaagtttatttctgatgtgtgccctcaactaacagagttgaacctttcttttgatagagcagttttgaaacactctttttgtaaaatctgcaagaggatatttggatagctttgaggatttcgttgcaaacggaatggcttcatataaactctagacagaagcattctcagaaacttcgttgggatgtttcgattgaagtcccagtgttgaacattcccattcatagagcaggtttgaaacactctttttgtactatctggaagtggacatttggagcgctttcaggtctacggtgaaaaaggagatatcttccaataaaaactagatagaagcaatgtcagaacttttttcatgatgtatctactcagcaaacagagttgaacctttcttttgagagagcagttttgaaacactctttttgtggaatatgcaagtgggtattaggccagcttggaggatttccttggaaacgggaatacgtataaaaagcagacagcagcattgtcagaaactactttgtgatgtttgcattcaagtcacagaattgaacactccctttcacagagcaggtttgaaacactctttttgtagtgtctgtaagtgaacatttggattgctttcaggcctaaggtgaaaaaggaaatatcttcccataaaaactagacagaagcattctcagaaacttgtttgtgatgtgtgccctctactgacagagttgaacctttctttgcaaagagcagttttgaaacactctttttgtagaatctgcaagaggatatttggatagctttgaggatttacttgggaaacgggaatgtcttcagataaactctagacagaagcattctcagaaacttctttgggatgtttcaattgaagtcacagtgttgaacattccctttcacagagcaggtttgaaacactctttttgtagtgtctataagtgaacatttggcgtgctttcaggcctaacgtgaaaaaggaaatatcttcccataaaaactagacagaagcattctcagaaacttgttcgtgatgtgtgccctctactgacagaattgaacctttctttgcaaagagcagctttgaaacactctttttgtagaatctgcaagaggatatttggatagcttggaggatttcgttggaaacgggtatgtcttcagataaactctagacagaagcattctcagaaacttctttgggatgttgcattcaagtcacagagtagaacattcccattcatagagcagatttgaaacactctttttgtagtatctggaagtggacatttggagcgctttcaggcctatgttgaaaaaggaaatatcttcccataaaaactagacggaagcattctcagaaacttatttgtgatgtgtttgctcaactaacaggattgaaccatcgttttgaaggagcagttttgaaacactgttttcgtggaatctgcaagtggatatttggctagctttgaggatttcgttggaaacgggattacatatacaaaggagacagcagcattctcagaaacttctttgtgatgtctgcattcaattcacagagttgagcattccctttcatagagcaggttggaaacactctttttgtagtatctggatgaggacatttggagcgctttcaggcctatggtgaaaaaggaaatatcttcccgtaaaaactagacagaagcattctcagaagtttatttgtgatgtgtgccctcaactaacagagttgaacctttcttttgatagagcagttttgaaacactctttttgtaaaatctgcaagaggatatttggatagctttgaggatttcgttgcaaacgggaatggcttcatataaactctagacagaagcattctcagaaacttcgttgggatgtttcgattgaagtcccagtgttgaacattcccttttatagagcaggttggaaacactctttctgcattccctggaagtggacatttggagcgctttcaggacgacggtgaaaatggaaatatcttccaagaaaatctagatagaagcaatgtcagaaacttttatgtgatggatctactcagctaacagagttgaacctttcttttgagagagcagttttgcaacacactttttgtggaatatgcaagtggatattagggcagctttgaggatttcgttggaaacgggaatatatgtaaaaagcagacagcagcattctcagaaacttctttgtgatgtttgcattgaagtcacagagttgaacattccctttgagagagcaggtttgaaacacgccttttgtcatatctggaagtgtccattcggagcgcattcagggttgtgttgagaaaggaaatatcctcccataaaaactagacagaagcattctcagaaacttatttgtgatgtatgtactcaactaacagaactaaaccatcgttttgaaggagcagttttgaaagactctttttgcggaatctgcaactggatatttggctagcttggaggatttcgttggaagcgggattacatacaaaaagcagacagcagcattctcagaaacttctttgtgatgtttgcattcaagtcacagagttgaacattccctttcatagaacaggtttgaaacactctttttgtagtatctggaagtggacatttggagcgctttcaggtctacggtggaaaaggagatatcttccaataaaaactagatagaagcaatgtcagaacttttttcatgatgtatctactcagcaaacagagttgaacctttcttttgagagagcagttttgaaacactctttttgtggaatatgcaagtgggtattaggccagattggaggatttcgttggaaacgggaatacgtataaaaagcagacagcagcattttcagaaactactttgtgatgtttgcattcaagtcacagaattgaacactccctttcacagagcaggtttgaaacactctttttgtagtgtctgtaagtgaacatttggattgctttcaggcctaagatgaaaaaggaaatatcttcccataaaaactagacagaagcattctcagaaacttgtttgtgatgtgtgccctctactgacagagttgaacctttctttgcaaagagcagttttgaaacactctttttgtagaatctgcaggaggatatttggatagctttgaggatttcttgggaaacgggaatgtcttcagataaactctagacagaagcattctcaaaaacttctttgggatgattcaattgaagtcacagtgttgaacattccctttcacagagcaggtttgaaaaactctttttgtagtgtctataagtgaacatttggcgtgctttcaggagtaacgtgaaaaaggaaatatcttcccataaaaactagacagaagcattctcagaaacttgtttgtgatgtgtgccctctactgacagagttgaacctttctttgcaaagagcagctttgaaacactctttttgtagaatctgcaagaggatatttggatagctttgaggatttcgttggaaacgggtatgtcttcagataaactctagacagaagcattctcagaaacttctttgggatgttgcattcaagtcacagagtagaacattcccattcatagagccgatatgaaacactctttttgtagtatctggaagtggacatttggagcgctttcaggcctatgatgaaaaaggaaatatcttcccataaaaactagacggaaagcattctcagaaacttacttgtgatgtgtttgctcaactaacagaattgaaccatcgttttgaaggagcagttttgaaacactgttttcgtggaatctgcaagtggatatttggctagctttgaggatttcgttggaaacgggattacatataaaaaggagacagagcattctcagaaacttctttgtgatgtctgcattcaagtcacagagttgagcattccctttcatagagcaggttggaaacactctttttgtagtatctggatgaggacatttggagcgctttcaggcgtatggtgaaaaaggaaatatcttcccgtaaaaactagacagaagcattctcagaaatttatttgtgatgtgtgccctcaactaacagagttgaacctttcttttgatagagcagttttgaaacactctttttgtaaaatctgcaagaggatatttggatagctttgaggatttcattgcaaacgggaatggcttcatataaactctagacagaaagcattctcagaaacttcgtcgggatgtttcgattgaagtcccagtgttgaacattcccttttatagagcaggttggaaacactctttctgcattccctggaagtggacaattggagcgctttcaggacgacggtgaaaatggaaatatcttccaataaaatctggatagagcaacgtcagaaacttttctgtgatggatctactcagctaacagagttgaacctttcctttgagagagcagttttgcaacactctttttgtggaatatgcaagtggatattagggcagctttgaggatttcgttggaaacgggaatacatgtaaaaagcagacagcagcattctcagaaacttctttgtgatgtttgcattgaagtcacagagttgaacattccctttgagagagcaggtttgcaacacgccttttgtcatatctggaagtgtccattcggagcgcattcaggcttgtgttgaaaaaggaaatatcctcccataaaaactagacagaagcattctcagaaacttatttctgatgtatgtactcaactaacagaactaaaccatcgttttgaaggagcagttttgaaacacgctttttgcggaatctgcaactggatatttggctagcttggaggatttcgttggaaacgggattacatacaaaaagcagacagcagcattctcagaaacttctttgtgatgtttgcattcaagtcgcagagttgaacattccctttcatagagcaggtttgcaacactctttttgtagtatctggatgtggacatttggatcgctttcaggcctatgttgaaaaaggaaatatcttcccatgaaaactagacagaagcattctcagaaatttatttgtgatgtgtgccctcaactaacagagttgaacctttcttttgatagagcagttttgaaacactctttttgtaaaatctgcaagaggatatttggatagctttgaggatttcgttgcaaacgggaatggcttcatataaactctagacagaagcattctcagaaacttcgttaggatgtttcgattgaagtcccagtgttgaacattcccttttatagagcaggttggaaacactctttctgcattccctggaagtggacatttggagcgctttcaggacgacggtgaaaatggaaatatcttccaagaaaatctagatagaagcaatgtcagaaacttttatgtgatggatctactcagctaacagagttgaacctttcttttgagagagcagttttgcaacactctttttgtggaatatgcaagtggatattagggcagctttgaggatttcgttggaaacgggaatacatgtaaaaagcagacagcagcattctcagaaacttctttgtgatgtttgcattgaagtcacagagttgaacattccctttgagagagcaggtttgaaacacgccttttgtcatatctggaagtgtccattcggagcgcattcaggcttgtgttgaaaaaggaaatatcctcccataaaaactagacagaagcattctcagaaacttatctgtgatgtatgtactcaactaacagaactaaaccatcgttttgaaggagcagttttgaaacactctttttgcggaatctgcaagtggatatttggctagctgggaggatttcgttggaaacgggattacatacaaaaagcagagagcagcattctcagaaacttatttgtgatgtgtgccctcaactgacagtgttgaacctttgttttgatagagcagttctgaaacacactttttgtaaaatctgcaagaggatatttggatagctttgaggatttcgttggaaacgggaatgtcttcatgtaaactctacacagaagcattctcagaaactgctttgggatgtttcaattgaagtcccagtgttgaacattcccattcatagagcaggtttgaaacactctttttgtactatctggaagtggacatttggagcgctttcaggtctacggtgaaaaaggagatatcttccaataaaaactagatagaagcaatgtcagaacttttttcatgatgtatctactcagcaaacagagttgaacctttcttttgagagagcagttttgaaacactctttttgtggaatatgcaagtgggtattaggccagcttggaggatttcgttggaaacgggaatacgtataaaaagcagacagcagcattgtcagaaactactttgtgatgtttgcattcaagtcacagaattgaacactccctttcacagagcaggtttgaaacactctttttgtagtgtctgtaagtgaacatttggattgctttcaggcctaaggtgaaaaaggaaatatcttcccataaaaactagacagaagcattctcagaaacttgtttgtgatgtgtgccctctactgacagagttgaacctttctttgcaaagagcagttttgaaacactctttttgtagaatctgcaagaggatatttggatagctttgaggatttcttgggaaacgggaatgtcttcatgtaaactctggacagaagcattctcagaaacttctttgggatgtttcaattgaagtcacagtgttgaacattccctttcacagagcaggtttgaaacactctttttgtagtgtctataagtgaacatttggcgtgctttcaggcctaacgtgaaaaaggaaatatcttcccataaaaactagacagaagcattctcagaaacttgttcatgatgtgtgccctctactgacagagttgaacctttctttgcaaagcagcagctttgaaacactctttttgtagaatctgcaagaggatatttggatagctttgaggatttcgttggaaacgggtatgtcttcagataaactctagacagaagcattctcagaaacttctttgggatgttgcattcaagtcacagagtagaacattcccattcatagagcagatttgaaacactctttttgtagtatctggaagtggacatttggagcgctttcaggcctatgttgaaaaaggaaatatcttcccataaaaactagacggaagcattctcagaaacttatttgtgatgtgtttgctcaactaacaggattgaaccatcgttttgaaggagcagttttgaaacactgttttcgtggaatctgcaagtggatatttggctagctttgaggatttcgttggaaacgggattacatataaaaaggagacagcagcattctcagaaacttctttgtgatgtctgcattcaattcacagagttgagcattccctttcatagagcaggttggaaacactctttttgtagtatctggatgaggacatttggagcgctttcaggcgtatggtgaaaaaggaaatatcttcccttaaaaactagacagaagcattctcagaagtttatttgtgatgtgtgccctcaactaacagagttgaacctttcttttgatagaacagttttgaaacactctttttgtaaaatctgcaagaggatatctggatagctttgaggatttcgttgcaaacgggaatggcttcatataaactctagacagaagcattctcagaaacttcgttgggatgtttcgattgaagtcccagtgttgaacattcccttttatagagcaggttggaaacactctttctgcattccctggaagtggacatttggagcgctttcaggacgacggtgaaaatggaaatatcttccaagaaaatctagatagaagcaatgtcagaaacttttatgtgatggatctactcagctaacagagttgaacctttcttttgagagagcagttttgcaacactctttttgtggaatatgcaagtggatattagggcagctttgaggatttcgttggaaacgggaatacatgtaaaaagcagacagcagcattctcagaaacttctttgtgatgtttgcattgaagtcacagagttgaacattccctttgagagagcaggtttgaaacacgccttttgtcatatctggaagtgtccattcggagcgcattcaggcttgtgttgaaaaaggaaatatcctcccataaaaactagacagaagcattctcagaaacttatctgtgatgtatgtactcaactaacagaactaaaccatcgttttgaaggagcagttttgaaacactctttttgcggaatctgcaagtggatatttggctagctgggaggatttcgttggaaacgggattacatacaaaaagcagacagcagcattctcagaaacttatttgtgatgtgtgccctcaactgacagtgttgaacctttgttttgatagagcagttctgaaacacactttttgtaaaatctgcaagaggatatttggatagctttgaggatttcgttggaaacgggaatgtcttcatgtaaactctagacagaagcattctcagaaactgctttgggatgtttcaattgaagtcccagtgttgaacattcccattcatagagcaggtttgaaacactctttttgtactatctggaagtggacatttggagcgctttcaggtctacggtgaaaaaggagatatcttccaataaaaactagatagaagcaatgtcagaacttttttcatgatgtatctactcagcaaacagagttgaacctttcttttgagagagcagttttgaaacactccttttgtggaatatgcaagtgggtattaggccagcttggaggatttcgttggaaacgggaatacgtataaaaagcagacagcagcattgtcagaaactactttgtgatgtttgcattcaagtcacagaattgaacactccctttcacagagcaggtttgaaacactctttttgtagtgtctgtaagtgaacatttggattgatttcaggcctaaggtgaaaaaggaaatatcttcccataaaaactagacagaagcattctcagaaacttgtttgtgatgtgtgccctctactgacagagttgaacctttctttgcaaagagcagttttgaaacactctttttgtagaatctgcaagaggatatttggatagctttgaggatttcttgggaaacgggaatgtcttcagataaactctagacagaagcattctcagaaacttctttgggatgtttcaattgaagtcacagtgttgaacattccctttcacagagcaggtttgaaacactctttttgtagtgtctataagtgaacatttggcgtgctttcaggcgtaacgtgaaaaaggaaatatcttcccataaaaactagacagaagcattctcagaaacttgttcgtgatgtgtgccctctactgacagagttgaacctttctttgcaaagagcagctttgaaacactctttttgtagaatctgcaagaggatatttggatagctttgaggatttcgttggaaacgggtatgtcttcagataaactctagacagaagcattctcagaaacttctttgggatgttgcattcaagtcacagagtagaacattcccattcatagagcagatttgaaacactctttttgtagtatctggaagtggacatttggagcgctttcaggcctatgttgaaaaaggatatatcttcccataaaaactagacggaagcattctcagaaacttatttgtgatgtgtttgctcaactaacaggattgaaccatcgttttgaaggagcagttttgaaacactgttttcatggaatctgcaagtggatatttggctagctttgaggatttcgttggaaacgggattacatataaaaaggagacagcagcattctcagaaacttctttgtgatgtctgcattcaattcacagagttgagcattccctttcatagagcaggttggaaacactctttttgtagtatctggatgaggacatttggagcgctttcaggcctatggtgaaaaaggaaatatcttcccgtaaaaactagacagaagcattctcagaagtttatttgtgatgtgtgccctcaactaacagagttgaacctttcttttgatagagcagttttgaaacactctttttgtaaaatctgcaagaggatatttggatagctttgaggatttcgttgcaaacgggaatggcttcatataaactctagacagaagcattctcagaaacttcgttgggatgtttcgattgaagtcccagtgttgaacattcccttttatagagcaggttggaaacactctttctgcattccctggaagtggacatttggagcgctttcaggacgacggtgaaaatggaaatatcttccaagaaaatctagatagaagcaacgtcagaaacttttctgtgatggatctactcagctaacagagttgaacctttcttttgagagagcagttttgcaacactctttttgtggaatatgcaagtggatattagggcagctttgaggatttcgttggaaacgggaatacatgtaaaaagcagacagcagcattctcagaaacttctttgtgatgtttgcattgaagtcacagagttgaacattccctttgagagagcaggtttgaaacacgccttttgtcatatctggaagtgtccattcggagcgcattcaggcttgtgttgaaaaaggaaatatcctcccataaaaactagacagaagcattctcagaaacttatctgtgatgtatgtactcaactaacagaactaaaccatcgttttgaaggagcagttttgaaacactctttttgcggaatctgcaagtggatatttggctagctgggaggatttcgttggaaacgggattacatacaaaaagcagacagcaagcattctcagaaacttatttgtgatgtgtgccctcaactgacagtgctgaacctttgttttgatagagcagttctgaaacacactttttgtaaaatctgcaagaggatatttggatagctttgaggatttcgttggaaacgggaatgtcttcatgtaaactctacacagaagcattctcagaaactgctttgggatgtttcaattgaagtcccagtgttgaacattcccattcatagagcaggtttgaaacactctttttgtactatctggaagtggacatttggagcgctttcaggtctacggtgaaaaaggagatatcttccaataaaaactagatagaagcaatgtcagaacttttttcatgatgtatctactcagcaaacagagttgaacctttcttttgagagagcagttttgaaacactctttttgtggaatatgcaagtgggtattaggccagcttggaggatttcgttggaaacgggaatacgtataaaaagcagacagcagcattgtcagaaactactttgtgatgtttgcatgcaagtcacagaatggaacactgcctttcacagagcaggtttgaaacactctttttgtagtgtctgtaagtgaacatttggattgctttcaggcctaaggtgaaaaaggaaatatcttcccataaaaactagacagaagcattctcagaaacttgtttgtgatgtgtgccctctactgacagagttgaacctttctttgcaaagaccagttttgaaacactctttttgtagaatctgcaagaggatatttggatagctttgaggatttcttgggaaacgggaatgtcttcagataaactctagacagaagcattctcagaaacttctttgggatgtttcaattgaagtcacagtgttgaacattccctttcacagagcaggtttgaaacactctttttgtagtgtctataagtgaacatttggcgtggtttcaggcgtaacgtgaaaaaggacatatcttcccatgaaaactagacagaagcattctcagaaacttgttcttgatgtgtgccctctactgacagagttgaacctttctttgcaaagagcagctttgaaacactctttttgtagaatctgcaagaggatatttggatagctttgaggatttcgttggaaacgggtatgtcttcagataaactctagacagaagcattctcagaaacttctttgggatgttgcattcaagtcacagagtagaacattcccattcatagagcagatttgaaacactctttttgtagtatctggaagtggacatttggagcgctttcaggcctatgttgaaaaaggaaatatcttcccataaaaactagacggaagcattctcagaaacttacttgtgatgtgtttgctcaactaacagaattgaaccatcgttttgaaggagcagttttgaaacactgttttcgtggaatctgcaagtggatatttggctagctttgaggatttcgttggaaacgggattacatataaaaaggagacagcagcattctcagaaacttctttgtgatgtctgcattcaagtcacagagttgagcattccctttcatagagcaggttggaaacactctttttgtagtatctggatgaggacatttggagcactttcaggcgtatggtgaaaaaggaaatatcttcccgtaaaaactagacagaagcattctcagaagtttatttgtgatgtgtgccctcaactaacagagttgaaactttcttttgatagagcagttttgaaacactcattttgtaaaatctgcaagaggatatttggatagctttgaggatttcgttgcaaacgggaatggcttcatataaactctagacagaagcattctcagaaacttcgttgggatgtttcgattgaagtcccagtgttgaacattcccttttatagagcaggttggaaacactctttttgcattccctggaagtggacatttggagcgctttcaggacgacggtgaaaatggaaatatcttccaagaaaatctagatagaagcaatgtcagaaacttttatgtgatggatctactcagctaacagagttgaacctttcttttgagagagcagttttgcaacactctttttgtggaatatgcaagtggatattagggcagctttgaggatttcgttggaaacgggaatacatgtaaaaagcagacagcagcattctcagaaacttctttgtgatgtttgcattgaagtcacagagttgaacattccctttgagagagcaggtttgaaacacgccttttgtcatatctggaagtgtccattcggagcgcattcaggcttgtgttgaaaaaggaaatatcctcccataaaaactagacagaagcattctcagaaacttatctgtgatgtatgtactcaactaacagaactaaaccatcgttttgaaggagcagttttgaaacactctttttgcggaatctgcaagtggatatttggctagctgggaggatttcgttggaaacgggattacatacaaaaagcagacagcagcattctcagaaacttatttgtgatgtgtgccctcaactgacagtgttgaacctttgttttgatagagcagttctgaaacacactttttgtaaaatctgcaagaggatatttggatagctttgaggatttcgttggaaacgggaatgtcttcatgtaaactctagacagaagcattctcagaaactgctttgggatgtttcaattgaagtcccagtgttgaacattcccattcatagagcaggtttgaaacactctttttgtaatatctggaagtggacatttggagcgctttcaggtctacggtgaaaaaggagatatcttccaataaaaactagatagaagcaatgtcagaacttttttcatgatgtatctactcagcaaacagagttgaacatttcttttgagagagcagttttgaaacactctttttgtggaatatgcaagtgggtattaggccagcttggaggatttcgttggaaacgggaatacgtataaaaagcagacagcagcattgtcagaaactactttgtgatgtttgcattcaagtcacagcaattgaacactccctttcacagtagcaggtttgaaactctctttttgtagtgtctataagtgaacatttggcgtgctttcaggcgtaacgtgaaaaaggaaatatcttcccataaaaactagacagaagcattctcagaaacttgttcttgatgtgtgccctctactgacagagttgaacctttctttgcaaagagcagttttgaaacactctttttgtagaatctgcaagaggatatttggatagctttgaggatttcttgggaaacgggaatgtcttcagataaactctagacagaagcattctcagaaacttctttgggatgtttcaattgaagtcacagtgttgaacattccctttcacagagcaggtttgaaacactctttttgtagtgtctataagtgaacatttggcgtgctttcaggcgtaacgtgaaaaaggaaatatcttcccataaaaaccagacagaagcattctcagaaacttgttcgtgatgtgtgccctctactgacagagttgaacctttctttgcaaagagcagctttgaaacacacatttgtagaatctgcaagaggatatttggatagcttggaggatttcgttggaaacgggtatgtcttcagataaactctagacagaagcattctcagaaacttctttgggatgttgcattcaagtcacagagtagaacattcccattcatagagcagatttgaaacactctttttgtagtatctggaagtggacatttggagcgctttcaggcctatgttgaaaaaggaaatatcttcccataaaaactagacggaagcattttcagaaacttacttgtgatgtgtttgctcaactaacagaattgaaccatcgttttgaaggagcacttttgaaacactgttttcgtggaatctgcaagtggatatttggctagctttgaggatttcgttggaaacgggattacctataaaaaggagacagcagcattctcagaaacttctttgtgatgtctgcattcaagtcacagagttgagcattccctttcatagagcaggtttgaaacactgtttttgtagtatctggatgaggacatttggagcgctttcaggtgtatggtgaaaaaggaaatatcttcccgtaaaaactagacagaagcattctcagaaatttatttgtgatgtgtgccctcaactaacagagttgaacctttcttttgatagagcagttttgaaacactctttttgtaaaatctgcaagaggatatttggatagctttgaggatttcattgcaaacgggaatggcttcatataaactctagacagaagcattctcagaaacttcgttgggatgtttcgattgaagtcccagtgttgaacattcccttttatagagcaggttggaaacactctttttgcattccctggaagtggacatttggagcgctttcaggacgacggtgaaaatggaaatatcttccaagaaaatctagatagaagcaacgtcagaaacttttctgtgatggatctactcagctaacagagttgaacctttcttttgagagagcagttttgcaacactctttttgtggaatatgcaagtggatattagggcagctttgaggatttcgttggaaacgggaatacatgtaaaaagcagacagcagcattctcagaaacttctttgtgatgtttgcattgaagtcacagagttgaacattccctttgagagagcaggtttgaaacacgccttttgtcatatctggaagtgtccattcggagcgcattcaggcttgtgttgaaaaaggatatatcctcccataaaaactagacagaagcattctcagaaacttatctgtgatgtatgtactcaactaacagaactaaaccatcgttttgaaggagcagttttgaaacactctttttgcggaatctgcaagtggatatttggctagctgggaggatttcgttggaaacgggattacatacaaaaagcagacagcagcattctcagaaacttatttgtgatgtgtgccctcaactgacagtgttgaacctttgttttgatagagcagttctgaaacacactttttgtaaaatctgcaagaggatatttggatagctttgaggatttcgttggaaacgggaatgtcttcatgtaaactctagacagaagcattctcagaaactgctttgggatgtttcaattgaagtcccagtgttgaacattccctttcatagagcaggtttgaaacactctttttgtactatctggaagtggacatttggagcgctttcaggtctacggtgaaaaaggagatatcttccaataaaaactagatagaagcaatgtcagaacttttttcatgatgtatctactcagctaacagagttgaacctttcttttgagagagcagttttgaaacactctttttgtggaatatgcaagtgggtattaggccagcttggaggatttcgttggaaacgggaatacgtataaaaagcagacagcagcattgtcagaaactactttgtgatgtttgcatgcaagtcacagaatggaacactgcctttcacagagcaggtttgaaacactctttttgtagtgtctgtaagtgaacatttggattgctttcaggcctaaggtgaaaaaggaaatatcttcccataaaaactagacagaagcattctcagaaacttgtttgtgatgtgtgccctctactgacagagttgaacctttctttgcaaagagcagttttgaaacactctttttgtagaatctgcaagaggatatttggatagctttgaggatttcttgggaaacgggaatgtcttcagataaactctagacagaagcattctcagaaacttctttgggatgtttcaattgaagtcacagtgttgaacattccctttcacagagcaggtttgaaacactctttttgtagtgtctataagtgaacatttggcgtgctttcaggcctaacgtgaaaaaggaaatatcttcccataaaaactagacagaagcattctcagaaacttgttcatgatgtgtgccctctactgacagagttgaacctttctttgcaaagagcagctttgaaacactctttttgtagaatctgcaagaggatatttggatagctttgaggatttcgttggaaacgggtatgtcttcagataaactctagacagaagcattctcagaaacttctttgggatgtttcaattgaagtcacagtgttgaacattccctttcacagagcaggtttgaaacactctttttgtagtgtctataagtgaacatttggcgtgctttcaggcgtaacgtgaaaaaggaaatatcttcccataaaaagtagacggaaagcattctcagaaacttgttcgtgatgtgtgccctctactgacagagttgaacctttctttgcaaagagcagctttgaaacacactttttgtagaatctgcaagaggatatttggatagcttggaggatttcgttggaaacgggtatgtcttcagataaactctagacagaagcattctcagaaacttctttgggatgttgcattcaagtcacagagtagaacattcccattcatagagcagatttgaaacactctttttgtagtatctggaagtggacatttggagcgctttcaggcctatgttgaaaaaggaaatatcttcccataaaaactagacggaagcattctcagaaacttatttgtgatgtgtttgctcaactaacaggattgaaccatcgttttgaaggagcagttttgaaacactgttttcgtggaatctgcaagtggatatttggctagctttgaggatttcgttggaaacgggattacatataaaaaggagacagcagcattctcagaaacttctttgtgatgtctgcattcaattcacagagttgagcattccctttcatagagcaggttggaaacactctttttgtagtatctggatgaggacatttggagcgctttcaggcgtatggtgaaaaaggaaatatcttccctgtaaaaactagacagaagcattctcagaagtttatttgtgatgtgtgccctcaactaacagagttgaacctttcttttgatagagcagttttgaaacactctttttgtaaaatctgcaagaggatatttggatagctttgaggatttcgttgcaaacgggaatggcttcatataaactctagacagaagcattctcagaaacttcgttgggatgtttcgattgaagtcccagtgttgaacattcccttttatagagcaggttggaaacactctttctgcattccctggaagtggacatttggagcgctttcaggacgacggtgaaaatggaaatatcttccaagaaaatctagatagaagcaatgtcagaaacttttatgtgatggatctactcagctaacagagttgaacctttcttttgagagagcagttttgcaacactctttttgtggaatatgcaagtggatattagggcagctttgaggatttcgttggaaacgggaatacatgtaaaaagcagacagcagcattctcagaaacttctttgtgatgtttgcattgaagtcacagagttgaacattccctttgagagagcaggtttgaaacacgccttttgtcatatctggaagtgtccattcggagcgcattcaggcttgtgttgaaaaaggaaatatcctcccataaaaactagacagaagcattctcagaaacttatctgtgatgtatgtactcaactaacagaactaaaccatcgttttgaaggagcagttttgaaacactctttttgcggaatctgcaagtggatatttggctagctgggaggatttcgttggaaacgggattacatacaaaaagcagacagcagcattctcagaaacttatttgtgatgtgtgccctcaactgacagtgttgaacctttgttttgatagagcagttctgaaacacactttttgtaaaatctgcaagaggatatttggatagctttgaggatttcgttggaaacgggaatgtcttcatgtaaactctacacagaagcattctcagaaactgctttgggatgtttcaattgaagtcccagtgttgaacattccctttcatagagcaggtttgaaacactctttttgtactatctggaagtggacatttggagcgctttcaggtctacgatgaaaaaggagatatcttccaataaaaactagatagaagcaatgtcagaacttttttcatgatgtatctactcagcaaacagagttgaacctttcttttgagagagcagttttgaaacactctttttgtggaatatgcaagtgggtattaggccagcttggaggatttcgttggaaacgggaatacgtataaaaagcagacagcagcattctcagaatcttctttgggatgtttcaattgaagtcacagtgttaaacattccctttcacagagcaggtttgaaacactctttttgtaatgtctcgaagtgaacatttggcgtgatttcaggcctaacatgaaaaaggaaatatcttcccataaaaactagacagaagcattctcagaaacttgtttgtgatgtgtgccctctactgacagagttgaacctttctttgcaaagagcagttttgaaaccctctttttgtagaatctgcaagaggatacttggatagctttgagtatttcttgggaaacgggaatgtcttcagataaactctagacagaagcattctcagaaactcctttgggatgtttcaattgaagtcacagttttgaagattccctttcacagagcaggtttgaaacactctttttgtagtttctataagtgaacatttggagtgctttcaggcctcacgtgaaaaaggaaatatcttcccataaaaactagacagaagcattctcagaaacttgtttgtgatgtgtgccctctactgacagaggtgaacctttctttgcaaagagcagctttgaaacactctttttgtagaatctgcaagaggatatttggatagctttgaggatttcgttggaaacgggtatgtcttcagataaactctagacagaagcattctcagaaacttctttgggatgttgcattcaagtcacagagtagaacattcccattcatagagcaggtttgaaacactctttttgtagtatctggaagtggacatttggagcgctttcaggcctatgttgaaaaaggatatattttcccataaaaactagacagaagcattctcagaaacttaattgtgatgagtttgctcaactaacaggattgaaccatccttttgaaggagcagttttgaaacactgttttcgtggaatctgcaagtggatatttggctagctttgaggatttcgttggaaacgggattacatataaaaaggagacagcagcattctcagaaacttctttgtgatgtctgcatttaattcacagagttgagcattccctttcatagagcaggttggaaacactctttttgtagtatctggatgaggacatttggagcgctttcaggcgtatggtgaaaagggaaatatcttcccgtaaaaactagacagaagcattctcagaaatttatttgtgatgtgtgccctcaactaacagagttgaacctttcttttgatagagcagttttgaaacactctttttgtaaaatctgcaagaggatatttggatagctttgaggatttcattgcaaacgggaatggcttcatataaactctagacagaagcattctcagaaacttcgttgggatgtttcgattgaagtcccagtgttgaacattcccttttatagagcaggttggaaacactctttctgcattccctggaagtggacatttggagcgctttcaggacgacggtgaaaatggaaatatcttccaagaaaatctagatagaagcaacgtcagaaacttttctgtgatggatctactcagctaacagagttgaacctttcttttgagagagcagttttgcaacactctttttgtggaatatgcaagtggatattagggcagctttgaggatttcgttggaaacgggaatacatgtaaaaagcagacagcagcattctcagaaacttctttgtgatgtttgcattgaagtcacagagttgaacattccctttgagagagcaggtttgaaacacgccttttgtcatatctggaagtgtccattcggagcgcattcaggcttgtgttgaaaaaggaaatatcctcccataaaaactagacagaagcattctcagaaacttatctgtgatgtatgtactcaactaacagaactaaaccatcgttttgaaggagcagttttgaaacactctttttgcggaatctgcaagtggatatttggctagctgggaggatttcgttggaaacgggattacatacaaaaagcagacagcagcattctcagaaatttatttgtgatgtgtgccctcaactaacagagttgaacctttcttttgatagagcagttttgaaacactctttttgtaaaatctgcaagaggatatttggatagctttgaggatttcgttggaaacgggaatgtcttcatgtaaactctagacagaagcattctcagaaactgctttgggatgtttcaattgaagtcccagtgttgaacattcccattcatagagcaggtttgaaacactctttttgtactatctggaagtggacatttggagcgctttcaggtctacggtgaaaaaggagatatcttccaataaaaactagatagaagcaatgtcagaacttttttcatgatgtatctactcagctaacagagttgaacctttcttttgagagagcagttttgaaacactctttttgtggaatatgcaagtgggtattaggccagcttggaggatttcgttggaaacgggaatacgtataaaaagcagacagcagcattgtcagaaactactttgtgatgtttgcattcaagtcacagaattgaacactccctttcacagagcaggtttgaaactctctttttgtagtgtctataagtgaacatttggcgtgctttcaggcgtaacgtgaaaaaggaaatatcttcccataaaaactagacagaagcattctcagaaacttgtttgtgatgtgtgccctctactgacagagttgaacctttctttgcaaagaccagttttgaaacactctttttgtagaatctgcaagaggatatttggatagctttgaggatttcttgggaaacgggaatgtcttcagataaactctagacagaagcattctcagaaacttctttgggatgtttcaattgaagtcacagtgttgaacattccctttcacagagcaggtttgaaacactctttttgtagtgtctataagtgaacatttggcgtgctttcaggcctaacgtgaaaaaggaaatatcttcccataaaaactagacagaagcattctcagaaacttgttcatgatgtgtgccctctactgacagagttgaacctttctttgcaaagagcagctttgaaacactctttttgtagaatctgcaagaggatatttggatagctttgaggatttcgttggaaacgggtatgtcttcagataaactctagacagaagcattctcagaaacttctttgggatgttgcattcaagtcacagagtagaacattcccattcatagagcagatttgaaacactctttttgtagtatctggaagtggacatttggagcgctttcaggcctatgttgaaaaaggaaatatcttcccataaaaactagacggaagcattctctgaaacttatttgtgatgtgtgtactcaactaacagaattgaaccatcgttttgaaagagcaattttgaaacactctttttctggaatctgcaagtcgatatttgtctagcattgaggatttcgttggaaacgggattacatataaaagcagacagcagcattcccagaaacttctttgtgatgtttgcattcaagtcacagagtttaacattccctttcatagagcaggtttgaaacactctttttgtagtatctggatgtggacatttggagcgctttcaggcctatggtgaaaaaggaaatatcttcccctgaaaactagacagaagcattctcaggaaatttatttgtgatgtgtgccctcaactaacagagttgaacctttcttttgatagagcagttttgaaacactctttttgtaaaatctgcaagaggatatttggatagctttgaggatttcgttgcaaacgggaatggcttcatataaactctagacagaagcattctcagaaacttcgttgggatgtttcgattgaagtcccagtgttgaacattcccttttatagagcaggttggaaacactctttctgcattccctggaagtggacatttggagcgctttcaggacgacggtgaaaatggaaatatcttccaagaaaatctagatagaagcaatgtcagaaacttttatgtgatggatctactcagctaacagagttgaacctttcttttgagagagcagttttgcaacactctttttgtggaatatgcaagtggatattagggcagctttgaggatttcgttggaaacgggaatacatgtaaaaagcagacagcagcattttcagaaacttctttgtgatgtttgcattgaagtcacagagttgaacattccctttgagagagcaggtttgaaacacgccttttgtcatatctggaagtgtccattcggagcgcattcaggcttgtgttgaaaaaggaaatatcctcccataaaaactagacagaagcattctcagcaaacttatctgtgatgtatgtactcaactaacagcaactaaaccatcgttttgaaggagcagttttgaaacactctttttgcggaatctgcaagtggatatttggctagctgggaggatttcgttggaaacgggattacatacaaaaagcagacagcagcattctcagaaacttctttgtgatgtttgcattcaagtcacagagttgaacattccctttcatagagcaggtttgaaacactctttttgtagtatctggatgtggacatttggatcgctttcaggcctatggtgaaaaaggaaatatcttcccatgaaaactagacagaagcattctcagaaacttatttgtgatgtgtgccctcaactgacagtgttgaacctttgttttgatagagcagttctgaaacacactttttgtaaaatctgcaagaggatatttggatagctttgaggatttcgttggaaacgggaatgtcttcatgtaaactctagacagaagcattctcagaaactgctttgggatgtttcaattgaagtcccagtgttgaacattcccattcatagagcaggtttgaaacactctttttgtactatctggaagtggacatttggagcgctttcaggtctacggtgaaaaaggagatatcttccaataaaaactagatagaagcaatgtcagaacttttttcatgatgtatctactcagcaaacagagttgaacctttcttttgagagagcagttttgaaacactctttttgtggaatatgcaagtgggtattaggccagcttggaggatttcgttggaaacgggaatacgtataaaaagcagacagcagcattgtcagaaactactttgtgatgtttgcattcaagtcacagaattgaacactccctttcacagagcaggtttgaaacactctttttgtagtgtctgtaagtgaacatttggattgctttcaggcctaaggtgaaaaaggaaatatcttcccataaaaactagacagaagcattctcagaaacttgtttgtgatgtgtgccctctactgacagagttgaacctttctttgcaaagagcagttttgaaacactctttttgtagaatctgcaagaggatatttggatagctttgaggatttcttgggaaacgggaatgtcttcagataaactctagacagaagcattctcagaaacttctttgggatgtttcaattgaagtcacagtgttgaacattccctttcacagagcaggtttgaaacactctttttgtagtgtctataagtgaacatttggcgtgctttcaggcctaacgtgaaaaaggaaatatcttcccataaaaactagacagaagcattctcagaaacttgttcatgatgtgtgccctctactgacagagttgaacctttctttgcaaagagcagctttgaaacactctttttgtagaatctgcaagaggatatttggatagctttgaggatttctttggaaacgggtatgtcttcagataaactctagacagaagcattctcagaaacttctttgggatgttgcattcaagtcacagagtagaacattcccattcatagagcagatttgaaacactctttttgtagtatctggaagtggacatttggagcgctttcaggcctatgttgaaaaaggaaatatcttcccataaaaactagacggaagcattctcagaaacttatttgtgatgtgtttgctcaactaacaggattgaaccatcgttttgaaggagcagttttgaaacactgttttcgtggaatctgcaagtggatatttggctagctttgaggatttcgttggaaacgggattacatataaaaaggagacagcagcattctcagaaacttctttgtgatgtctgcattcaattcacagagttgagcattccctttcctagagcacgttggaaacactctttttgtagtatctggatgaggacatttggagcgctttcaggcgtatggtgaaaaaggaaatatcttcccgtaaaaactagacagaagcattctcagaagtttatttgtgatgtgtgccctcaactaacagagttgaacctttcttttgatagagcagttttgaaacactctttttgtaaaatctgcaagaggatatttggatagctttgaggatttcgttgcaaacgggaatggcttcatataaactctagacagaagcattctcagaaacttcgttgggatgtttcgattgaagtcccagtgttgaacattcccttttatagagcaggttggaaacactctttctgcattccctggaagtggacatttggagcgctttcaggacgacggtgaaaatggaaatatcttccaagaaaatctagatagaagcaacgtcagaaacttttctgtgatggatctactcagctaacagagttgaacctttcttttgagagagcagttttgcaacactctttttgtggaatatgcaagtggatattagggcagctttgaggatttcgttggaaacgggaatacatgtaaaaagcagacagcagcattctcagaaacttctttgtgatgtttgcattgaagtcacagagttgaacattccctttgagagagcaggtttgaaacacgccttttgtcatatctggaagtgtccattcggagcgcattcaggcttgtgttgaaaaaggaaatatcctcccataaaaactagacagaagcattctcagaaacttatctgtgatgtatgtactcaactaacagaactaaaccatcgttttgaaggagcagttttgaaacactctttttgcggaatctgcaagtggatatttggctagctgggaggatttcgttggaaacgggattacatacaaaaagcagacagcagcattctcagaaacttatttgtgatgtgtgccctcaactgacagtgctgaacctttgttttgatagagcagttctgaaacacactttttgtaaaatctgcaagaggatatttggatagctttgaggatttcgttggaaacgggaatgtcttcatgtaaactctacacagaagcattctcagaaactgctttgggatgtttcaattgaagtcccagtgttgaacattcccattcatagagcaggtttgaaacactctttttgtactatctggaagtggacatttggagcgctttcaggtctacggtgaaaaaggagatatcttccaataaaaactagatagaagcaatgtcagaacttttttcatgatgtatctactcagcaaacagagttgaacctttcttttgggagagcagttttgaaacactctttttgtggaatatgcaagtgggtattaggccagcttggaggatttcgttggaaacgggaatacgtataaaaagcagacagcagcattgtcagaaactactttgtgatgtttgcattcaagtcacagaactgaacactccctttcacagagcaggtttgaaacactctttttgtagtgtctgtaagtgaacatttggattgctttcaggcctaaggtgaaaaaggaaatatcttcccataaaaactagacagaagcattctcagaaacttgtttgtgatgtgtgccctctactgacagagttgaacctttctttgcaaagagcagttttgaaacactctttttgtagaatctgcaagaggatatttggatagctttgaggatttcttgggaaacgggaatgtcttcagataaactctagacagaagcattctcagaaacttctttgggatgtttcaattgaagtcacagtgttgaacattccctttcacagagcaggtttgaaacactctttttgtagtgtctataagtgaacatttggcgtgctttcaggcgtaacgtgaaaaaggaaatatcttcccataaaaactagacagaagcattctcagaaacttgttcgtgatgtgtgccctctactgacagagttgaacctttctttgcaaagagcagctttgaaacacactttttgtagaatctgcatgaggatatttggatagctttgaggatttcgttggaaacgggtatgtcttcagataaactctagacagaagcattctcagaaacttctttgggatgttgcattcaagtcacagagtagaacattcccattcatagagcagatttgaaacactctttttgtagtatctggaagtggacatttggagcgctttcaggcctatgttgaaaaaggaaatatcttcccataaaaactagacggaagcattctcagaaacttatttgtgatgtgtttgctcaactaacaggattgaaccatccttttgaaggagcagttttgaaacactgttttcgtggaatctgcaagtggatatttggctagctttgaggatttcgttggaaacgggattacatataaaaaggagacagcagcattctcagaaacttctttgtgatgtctgcattcaatttacagagttgagcattccctttcatagagcaggttggaaacactctttttgtagtatctggatgtggacatttggatcgctttcaggcctatggtgaaaaaggaaatatcttcccatgaaaactagacagaagcattctcagaaacttatttgtgatgtgtgcactcaactgacagtgttgaacctttgttttgatagagcagttctgaaacacactttttgtaaaatctgcaagaggatatttggatagctttgaggatttcgttggaaacgggaatgtcttcatgtaaactctagacagaagcattctcagaaactgctttgggacgtttcaattgaagtcccagtgttgaacattcccattcatagagcaggtttgaaacactctttttgtactatctggaagtggacatttggagcgctttcaggtctacggtgaaaaaggagatatcttccaataaaaactagatagaagcaatgtcagaacttttttcatgatgtatctactcagcaaacagagttgaacctttcttttgagagagcagttttgaaacactctttttgtggaatatgcaagtgggtattaggccagcttggaggatttcgttggaaacgggaatacgtataaaaagcagacagccagcattgtcagaaactactttgtgatgtttgcattcaagtcacagaattgaacactccctttcacagagcaggtttgaaacactctttttgtagtgtctgtaagtgaacatttggattgctttcaggcctaaggtgaaaaaggaaatatcttcccataaaaactagacagagcattctcagaaacttgtctgtgatgtgtgccctctactgacagagttgaacctttctttgcaaagagcagttttgaaacactctttttgtagaatctgcaagaggatatttggatagctttgaggatttcttgggaaacgggaatgtcttcagataaactctagacagaagcattctcagaaacttctttgggatgtttcaattgaagtcacagtgttgaacattccctttcacagagcaggtttgaaacactctttttgtagtgtctataagtgaacatttggcgtgctttcaggcctaacgtgaaaaaggaaatatcttcccataaaaactagacagaagcattctcagaaacttgttcgtgatgtgtgccctctactgacagagttgaacctttctttgcaaagagcagctttgaaacacactttttgtagaatctgcaagaggatatttggatagtgtttgaggatttcgttggaaacgggtatgtcttcagataaactctagacagaagcattctcagaaacttctttgggatgttgcatgcaagtcacagagtagaacattcccattcatagagcagatttgaaacactctttttgtagtatctggaagtggacatttggagcgctttcaggcctatgttgaaaaaggaaatatcttcccataaaaactagacggaagcattctcagaaacttatttgtgatgtgtttgctcaactaacaggattgaaccatcgttttgaaggagcagttttgaaacactgttttcgtggaatctgcaagtggatatttggctagctttgaggatttcgttggaaacgggattacatataaaaaggagacagcagcattctcagaaacttctttgtgatgtctgcattcaagtcacagagttgagcattccctttcatagagcaggttggaaacactctttttgtagtatctggatgaggacatttggagcgctttcaggcgtatggtgaaaaaggaaatatcttcccgtaaaaactagacagaagcattctcagaaatttatttgtgatgtgtgccctcaactaacagagttgaacctttcttttgatagagcagttttgaaacactctttttgtaaaatctgcaagaggatatttggatagctttgaggatttcgttgcaaacgggaatggcttcatatacactctagacagaagcattctcagaaacttcgttgggatgtttcgattgaagtcccagtgttgaacattcccttttatagagcaggttggaaacactctttctgcattccctggaagtggacatttggagcgctttcaggacgacggtgaaaatggaaatatcttccaagaaaatctagatagaagcaacgtcagaaacttttctgtgatggatctactcagctaacagagttgaacctttcttttgagagagcagttttgcaacactctttttgtggaatatgcaagtggatattagggcagctttgaggatttcgttggaaacgggaatacatgtaaaaagcagacagcagcattctcagaaacttctttgtgatgtttgcattgaagtcacagagttgaacattccctttgagagagcaggtttgaaacacgccttttgtcatatctggaagtgtccattcggagcgcattcaggcttgtgttgaaaaaggaaatatcctcccataaaaactagacagaagcattctcagaaacttatctgtgatgtatgtactcaactaacagaactaaaccaccgttttgatggagcagttttgaaacactctttttgcggaatctgcaagtggatatttggctagctgggaggatttcgttggaaacgggattacatacaaaaagcagacagcagcattcccagaaacttatttgtgatgtgtgccctcaactgacagtgttgaacctttgttttgatagaggagttctgaaacacactttttgtaaaatctgcaagaggatattgggatagctttgaggatttcgttggaaacgggaatgtcttcatgtaaactctagacagaagcattctcagaaactgctttcggatgtttcaattgaagtcacagtgttgaacactccctttcatagagcaggtttgaaacactctttttgtagtgtctataagtggacatttgtagggctttcaggtctacggtgaaaaagcagatatcttccaataaaaactagatagagcaatgtcagaacttttttcatgatgtatctactcagcaaacagagttgaacctttcttttgagagagcagttttgaaacactctttttgtggaatatgcaagtgggtattaggccagcttggaggatttcgttggaaacgggaatacgtataaaaagcagacagcagcattgtcagaaactactttgtgatgtttgcattcaagtcacagaattgaacactccctttcacagagcaggtttgaaacactctttttgtagtgtctgtaagtgaacatttggattgctttcaggcctatggtgaaaaaggaaatatcttcccataaaaactagacagaagcattctcagaaacttgtttgtgatgtgtgccctctactgacagagttgaacctttctttgcaaagagcagttttgaaacactctttttgtagaatctgcaagaggatatttggatagctttgaggatttcttgggaaacgggaatgtcttcagataaactctagacagaagcattctcagaaacttctttgggatgtttcaattgaagtcacagtgttgaacattccctttcacagagcaggtttgaaacactctttttgtagtgtctataagtgaacatttggcgtgctttcaggcctaacgtgaaaaaggaaatatcttcccataaaaactagacagaagcattctcagaaacttgttcatgatgtgtgccctctactgacagagttgaacctttctttgcaaagagcagctttgaaacactctttttgtagaatctgcaagaggatatttggatagctttgaggatttcgttggaaacgggtatgtcttcagataaactctagacagaaagcattctcagaaacttctttgggatgttgcattcaagtcacagagtagaacattcccattcatagagcagatttgaaacactctttttgtagtatctggaagtggacatttggagcgctttcaggcctatgttgaaaaaggaaatatcttcccataaaaactagacggagcattctcagaaacttacttgtgatgtgtttgctcaactaacagaattgaaccatcgttttgaaggagcagttttgaaacactgttttcgtggaatctgcaagtggatatttggctagctttgaggatttcgttggaaacgggattacatataaaaaggagacagcagcattctcagaaacttctttgtgatgtttgcattcaagtcacagagttgaacattccctttcatagagcaggtttgaaacactctttttgtagtatctggatgtggacatttggatcgctttcaggcctatggtgaaaaaggaaatatcttcccatgaaaactagacagaagcattctcagaaacttatttgtgatgtgtgcactcaactgacagtgttgaacctttgttttgatagagcagttctgaaacacactttttgtaaaatctgcaagaggatatttggatagctttgaggatttcgttggaaacgggaatgtcttcatgtgaactctagacagaagcattctcagaaactgctttgggatgtttcaattgaagtcccagtgttgaacattcccattcatagagcaggtttgaaacactctttttgtactatctggaagtggacatttggagcgctttcaggtctacggtgaaaaaggagatatcttccaataaaaactagatagaagcaatgtcagaactttcttcatgatgtatctactcagcaaacagagttgaacctttcttttgagagagcagttttgaaacactctttttgtggaatatgcaagtgggtattaggccagcttggaggatttcgttggaaacgggaatacgtataaaaagcagacagcagcattgtcagaaactactttgtgatgtttgcattcaagtcacagaattgaacactccctttcacagagcaggtttgaaacactctttttgtagtgtctgtaagtgaacatttggattgctttcaggcctaaggtgaaaaaggaaatatcttcccatgaaaactagacagaagcattctcagaaacttgtttgtgatgtgtgccctctactgacagagttgaacctttctttgcaaagagcagttttgaaacactctttttgtagaatctgcaagaggatatttggatagctttgaggatttcttgggaaacgggaatgtcttcagataaactctagacagaagcattctcagaaacttctttgggatgtttcaattgaagtcacagtgttgaacattccctttcacagagcaggtttgaaacactctttttgtagtgtctataagtgaacatttggcgtgctttcaggcctaacgtgaaaaaggaaatatcttcccataaaaactagacagaagcattctcagaaacttgttcgtgatgtgtgccctctactgacagagttgaacctttctttgcaaagagcagttttgaaacactctttttgtagaatctgcaagaggatatgtggatagctttgaggatttcgttggaaacgggtatgtcttcagataaactctagacagaagcattctcagaaacttctttgggatgtttcaattgaagtcacagtgttgaacattccctttcacagagcaggtttgaaacactctttttgtagtgtctataagtgaacatttggcgtgctttcaggcctaacgtgaaaaaggaaatatcttcccataaaaactagacagaagcattctcagaaacttgttcgtgatgtgtgccctctactgacagagttgaacctttctttgcaaagagcagctttgaaacacactttttgtagaatctgcaagaggatatttggatagctttgaggatttcgttggaaacgggtatgtcttcagataaactctagacagaagcattctcagaaacttctttggcatgttgcattcaagtcacagagtagaacattcccattcatagagcagatttgaaacactctttttgtagtatctggaagtggacatttggagcgctttcaggcctatgttgaaaaaggaaatatcttcccataaaaactagacggaagcattctcagaaacttacttgtgatgtgtttgctcaactaacagaattgaaccatcgttttgaaggagcagttttgaaacactgttttcgtggaatctgcaagtggatatttggctagctttgaggatttcgttggaaacgggattacatataaaaaggagacagcagcattctcagaaacttctttgtgatgtctgcattcaattcacagagttgagcattccctttcatagagcaggttggaaacactctttttgtagtatctggatgaggacatttggagcgctttcaggcgtatggtgaaaaaggaaatatcttcccgtaaaaactagacagaagcattctcagaagtttatttgtgatgtgtgccctcaactaacagagttgaacctttcttttgatagagcagttttgaaacactctttttgtaaaatctgcaagaggatatttggatagctttgaggatttcgttgcaaacgagaatggcttcacataaactctaggcagaagcattctcagaaacttcgttgggatgtttcgattgaagtcccagtgttgaacattcccttttatagagcaggttggaaacactctttctgctttccctggaagtggacatttggagcgctttcaggacgacggtgaaaatggaaatatcttccaagaaaatctagatagaagcaatgtcagaaacttttatgtgatggatctactcagctaacagagttgaacctttcttttgagagagcagttttgcaacactctttttgtggaatatgcaagtggatattagggcagctttgaggatttcgttggaaacgggaatacatgtaaaaagcagacagcagcattctcagaaacttctttgtgatgtttgcattgaagtcacagagttgaacattccctttgagagagcaggtttgaaacacgccttttgtcatatctggaagtgtccattcggagcgcattcaggcttgtgttgaaaaaggaaatatcctcccataaaaactagacagaagcattctcagaaacttatctgtgatgtatgtactcaactaacagaactaaaccatcgttttgaaggagcagttttgaaacactctttttgcggaatctgcaagtggatatttggctagctgggaggatttcgttggaaacgggattacatacaaaaagcagacagcagcattctcagaaacttatttgtgatgtgtgccctcaactgacagtgttgaacctttgttttgatagagcagttctgaaacacactttttgtaaaatctgcaagaggatatttggatagctttgaggatttcgttggaaacgggaatgtcttcatgtaaactctagacagaagcattctcagaaactgctttgggatgtttcaattgaagtcccagtgttgaacattcccattcatagagcaggtttgaaacactctttttgtactatctggaagtggacatttggagcgctttcaggtctacggtgaaaaaggagatatcttccaataaaaactagatagaagcaatgtcagaacttttttcatgatatatctactcagctaacagagttgaacctttcttttgagagagcagttttgaaacactctttgtgtggaatatgcaagtgggtattaggccagcttggaggatttcgttggaaacgggaatacgtataaaaagcagacagcagcattgtcagaaactactttgtgatgtttgcattcaagtcacagaattgaacactccctttcacagagcaggtttgaaacactctttttgtagtgtctgtaagtgaacatttggattgctttcaggcctaatgtgaaaaaggaaatatcttcccataaaaactagacacaagcattctcagaaacttgtttgtgatgtgtgccctctactgacagagttgaacctttctttgcaaagagcagttttgaaacactctttttgtagaatctgcaagaggatatttggatagctttgaggatttcttgggaaacgggaatgtcttcagataaactctagacagaagcattctcagaaacttctttgggatgtttcaattgaagtcacagtgttgaacattccctttcacagagcaggtttgaaacactctttttgtagtgtctataagtgaacatttggcgtgctttcaggcctaacgtgaaaaaggaaatatcttcccataaaaactagacagaagcattctcagaaacttgttcgtgatgtgtgccctctactgacagagttgaacctttctttgcaaagagcagctttgaaacacactttttgtagaatctgcaagaggatatttggatagcttttaggatttcgttggaaacgggtatgtcttcagataaactctagacagaagcattctcagaaacttctttgggatgttccattcaagtcacagagtagaacattcccattcatagagcagatttgaaacactctttttgtagtatctggaagtggacatttggagcgctttcaggcctatgttgaaaaaggaaatatcttcccataaaaactagacggaagcattctcagaaacttacttgtgatgtgtttgctcaactaacagaattgaaccatcgttttgaaggagcagttttgaaacactgttttcgtggaatctgcaagtggatatttggctagctttgaggatttcgttggaaacgggattacatataaaaaggagacagcagcattctcagaaacttctttgtgatgtctgcattcaagtcacagagttgagcattccctttcatagagcaggttggaaacactctttttgtagtatctggatgaggacatttggagcgctttcaggcgtatggtgaaaaaggaaatatcttcccgtaaaaactagacagaagcattctcagaagtttatttctgatgtgtgccctcaactaacagagttgaacctttcttttgatagagcagttttgaaacactctttttgtaaaatctgcaagaggatatttggatagctttgaggatttcgttgcaaacgggaatggcttcatataaactctagacagaagcattctcagaaacttcgttgggatgtttcgattgaagtcccagtgttgaacattccctttcatagagcaggttggaaacactctttctgcattccctggaagtggacatttggagcgctttcaggacgacggtgaaaatggaaatatcttccaagaaaatctagatagaagcaacgtcagaaacttttctgtgatggatctactcagctaacagagttgaacctttcttttgagagagcagttttgcaacactctttttgtggaatatgcaagtggatattagggcagctttgaggatttcgttggaaacgggaatacatgtaaaaagcagacagcagcattctcagaaacttctttgtgatgtttgcattgaagtcacagagttgaacattccctttgagagagcaggtttgaaacacgccttttgtcatatctggaagtgtccattcggagcgcattcaggcttgtgttgaaaaaggaaatatcctcccataaaaactagacagaagcattctcagaaacttatctgtgatgtatgtactcaactaacagaactaaaccatcgttttgaaggagcagttttgaaacactctttttgcggaatctgcaagtggatatttggctagctgggaggatttcgttggaaacgggattacatacaaaaagcagacagcagcattctcagaaacttatttgtgatgtgtgccctcaactgacagtgttgaacctttgttttgatagagcagttctgaaacacactttttgtaaaatctgcaagaggatatttggatagctttgaggatttcgttggaaacgggaatgtcttcatgtaaactctagacagaagcattctcagaaactgctttgggatgtttcaattgaagtcccagtgttgaacattcccattcatagagcaggtttgaaacactctttttgtactatctggaagtggacatttggagcgctttcaggtctacggtgaaaaaggagatatcttccaataaaaactagatagaagcaatgtcagaacttttttcatgatgtatctactcagctaacagagttgaacctttcttttgagagagcagttttgaaacactctttttgtggaatatgcaagtgggtattaggccagcttggaggatttcgttggaaacgggaatacgtataaaaagcagacagcagcattgtcagaaactactttgtgatgtttgcattcaagtcacagaattgaacactccctttcacagagcaggtttgaaacactctttttgtagtgtctataagtgaacatttggcgtgctttcaggcctaaggtgaaaaaggaaatatcttcccataaaaactagacagaagcattctcagaaacttgtttgtgatgtgtgccctctactgacagagttgaacctttctttgcaaagagcagctttgaaacactctttttgtagaatctgcaagaggatatgtggatagctttgaggatttcgttggaaacgggaatgtcttcagataaactctagacagaagcattctcagaaacttctttgggatgtttcaattgaagtcacagtgttgaacattccctttcacagagcaggtttgaaacactctttttgtagtgtctataagtgaacatttggcgtgctttcaggcctaacgtgaaaaaggaaatatcttcccataaaaactagacagaagcattctcagaaacttgttcatgatgtgtgccctctactgacagagttgaacctttctttgcaaagagcagctttgaaacactctttttgtagaatctgcaagaggatatttggatagcttggaggatttcgttggaaacgggtatgtcttcagataaactctagacagaagcattctcagaaacttctttgggatgttgcattcaagtcacagagtagaacattcccattcatagagcagatttgaaacactctttttgtagtatctggaagtggacatttggagcgctttcaggcctatgttgaaaaaggaaatatcttcccataaaaactagacggaagcattctcagaaacttatttgtgatgtgtttgctcaactaacaggattgaaccatcgttttgaaggagcagttttgaaacactgttttcgtggaatctgcaagtggatatttggctagctttgaggatttcgttggaaacgggattacatataaaaaggagacagcagcattctcagaaacctctttgtgatgtctgcattcaagtcacagagttgagcattccctttcatagagcaggttggaaacactctttttgtagtatctggatgaggacatttggagcgctttcaggcgtatggtgaaaaaggaaatatcttcccgtaaaaactagacagaagcattctcagaaatttatttgtgatgtgtgccctcaactaacagagttgaacctttcttttgatagagcagttttgaaacactctttttgtaaaatctgcaagaggatatttggatagctttgaggatttcattgcaaacgggaatggcttcatataaactctagacagaagcattctcagaaacttcgttgggatgtttcgattgaagtcccagtgttgaacattcccttttatagagcaggttggaaacactctttctgcattccctggaagtggacatttggagcgctttcaggacgacggtgaaaatggaaatatcttccaagaaaatctagatagaagcaacgtcagaaacttttctgtgatggatctactcagctaacagagttgaacctttcttttgagagagcagttttgcaacactctttttgtggaatatgcaagtggatattagggcagctttgaggatttcgttggaaacgggaatacatgtaaaaagcagacagcagcattctcagaaacttctttgtgatgtttgcattgaagtcacagagttgaacattccctttgagagagcaggtttgaaacacgccttttgtcatatctggaagtgtccattcggagcgcattcaggcttgtgttgaaaaaggaaatatcctcccataaaaactagacagaagcattctcagaaacttatttgtgatgtatgtactcaagtaacagaactaaaccatcgttttgaaggagcagttttgaaacactctttttgcggaatctgcaagtggatatttggctagctgggaggatttcgttggaaacgggattacatacaaaaagcagacagcagcattctcagaaacttatttgtgatgtgtgccctcaactgacagtgttgaacctttgttttgatagagcagttctgaaacacactttttgtaaaatctgcaagaggatatttggatagctttgaggatttcgttggaaacgggaatgtcttcatgtaaactctagacagaagcattctcagaaactgctttgggatgtttcaattgaagtcccagtgttgaacattcccattcatagagcaggtttgaaacactctttttgtactatctggaagtggacatttggagcgctttcaggtctacggtgaaaaaggagatatcttccaataaaaactagatagaagcaatgtcagaacttttttcatgatgtatctactcagcaaacagagttgaacctttcttttgagagagcagttttgaaacactctttttgtggaatatgcaagtgggtattaggccagcttggaggatttcgttggaaacgggaatacgtataaaaagcagacagcagcattgtcagaaactactttgtgatgtttgcattcaagtcacagaattgaacactccctttcacagagcaggtttgaaacactctttttgtagtgtctgtaagtgaacatatggattgctttcaggcctaaggtgaaaaaggaaatatcttcccataaaaactagacagaagcattctcagaaacttgtttgtgatgtgtgccctctactgacagagttgaacctttctttgcaaagagcagttttgaaacactctttttgtagaatctgcaagaggatatttggatagctttgaggatttcttgggaaacgggaatgtcttcagataaactctagacagaagcattctcagaaacttctttgggatgtttcaattgaagtcacagtgttgaacattccctttcacagagcaggtttgaaacactctttttgtagtgtctataagtgaacatttggcgtgctttcaggcctaacgtgaaaaaggaaatatcttcccataaaaactagacagaagcattctcagaaacttattcatgatgtgtgccctctactgacagagttgaacctttctttgcaaagagcagctttgaaacactctttttgtagaatctgcaagaggatatttggatagctttgaggatttcgttggaaacgggtatgtcttcagataaactctagacagaagcattctcagaaacttctttgggatgttgcattcaagtcacagagtagaacattcccattcatagagcagatttgaaacactctttttgtagtatctggaagtggacatttggagcgctttcaggcctatgttgaaaaaggaaatatcttcccataaaaactagacggaagcattctcagaaacttacttgtgatgtgtttgctcaactaacagaattgaaccatcgttttgaaggagcagttttgaaacactgttttcgtggaatctgcaagtggatatttggctagctttgaggatttcgttggaaacgggattacatataaaaaggagacagcagcattctcagaaacttctttgtgatgtttgcattcaagtcacagagttgaacattccctttcatagagcaggtttgaaacactctttttgtagtatctggatgtggacatttggatcgctttcaggcctatggtgaaaaaggaaatatcttcccatgaaaactagacagaagcactctcagaaacttgtttgtgatgtgtgccctctactgacagagttgaacctttctttgcaaagagcagttttgaaacactctttttgtagaatctgcaagaggatatttggatagctttgaggatttcttgggaaacgggaatgtcttcagataaactctagacagaagcattctcagaaacttctttgggatgtttcaattgaagtcacagtgttgaacattccctttcacagagcaggtttgaaacactctttttgtagtgtctataagtgaacatttggcgtgctttcaggcctaacgtgaaaaaggaaatatcttcccataaaaactagacagaagcattctcagaaacttgttcttgatgtgtcccctctactgacagagttgaacctttctttgcaaagagcagctttgaaacactctttttgtagaatctgcaagaggatatttggatagcttggaggatttcgttggaaacgggtatgtcttcagataaactctagacagaagcattctcagaaacttctttgggatgttgcattcaagtcacagagtagaacattcccattcatagagcagatttgaaacactctttttgtagtatctggaagtggacatttggagcgctttcaggcctatgttgaaaaaggaaatatcttcccataaaaactagacggaagcattctccgaaacttatttgtgatgtgtttgctcaactaacaggattgaaccatcgttttgaaggagcagttttgaaacactgttttcgtggaatctgcaagtggatatttggctagctttgaggatttcgttggaaacgggattacatgtaaaaaggagacagcagcattctcagaaacttctttgtgatgtctgcattcaattcacagagttgagcattccctttcatagagcacgttggaaacactctttttgtagtatctggatgaggacatttggagcgctttcaggcctatggtgaaaaaggaaatatcttcccgtaaaaactagacagaagcattctcagaagtttatttgtgatgtgtgccctcaactaacagagttgaacctttcttttgatagagcagttttgaaacactctttttgtaaaatctgcaagaggatatttggatagctttgaggatttcgttgcaaacgggaatggcttcatataaactctagacagaagcattctcagaaacttcgttgggatgtttcgattgaagtcccagtgttgaacattcccttttatagagcaggttggaaacactctttctgcattccctggaagtggacatttggagcgctttcaggacgacggtgaaaatggaaatatcttccaagaaaatctagatagaagcaacgtcagaaacttttctgtgatggatctactcagctaacagagttgaacctttcttttgagagagcagttttgcaacactctttttgtggaatatgcaagtggatattagggcagctttgaggatttcgttggaaacgggaatacatgtaaaaagcagacagcagcattctcagaaacttctttgtgatgtttgcattgaagtcacagagttgaacattccctttgagagagcaggtttgaaacacgccttttgtcatatctggaagtgtccattcggagcgcattcaggcttgtgttgaaaaaggaaatatcctcccataaaaactagacagaagcattctcagaaacttctttgtgatgtctgcattcaattcacagagttgagcattccctttcatagagcaggttggaaacactctttttgtagtatctggatgtggacatttggatcgcttttaggcctatggtgaaaaaggaaatatcttcccatgaaaactagacagaagcattctcagaaacttatttgtgatgtgtgcactcaactgacagtgttgaacctttgctttgatagagcagttctgaaacacactttttgtaaaatctgcaagaggatatttggatagctttgaggatttcgttggaaacgggaatgtcttcatgtaaactctagacagaagcattctcagaaactgctttgggatgtttcaattgaagtcccagtgttgaacattcccattcatagagcaggtttgaaacactctttttgtactatctggaagtggacatttggagcgctttcaggtctacggtgaaaaaggagatatcttccaataaaaactagatagaagcaatgtcagaacttttttcatgatgtatctactcagcaaacagagttgaacctttcttttgagagagcagttttgaaacactctttttgtggaatatgaaagtgggtattaggccagcttggaggatttcgttggaaacgggaatacgtataaaaagcagacagcagcattgtcagaaactactttgtgatgtttgcattcaagtcacagaactgaacactccctttcacagagcaggtttgaaacactctttttgtagtgtctgtaagtgaacatttggattgctttcaggcctaaggtgaaaaaggaaatatcttcccataaaaactagacagaagcattctcagaaacttgtttgtgatgtgtgtcctctactgacagagttgaacctttctttgcaaagagcagttttgaaacactctttttgtagaatctgcaagaggatatttggatagctttgaggatttcttgggaaacgggaatgtcttcagataaactctagacagaagcattctcagaaacttctttgggatgtttcaattgaagtcacagtgttgaacattccctttcacagagcaggtttgaaacactctttttgtagtgtctataattgaacatttggcgtgctttcaggcctaacgtgaaaaaggaaatatcttcccataaaaactagacagaagcattctcagaaacttgtttgtgatgtgtgccctctactgacagagttgaacctttctttgcaaagagcagctttgaaacactctttttgtagaatctgcaagaggatatgtggatagctttgaggatttcgttggaaacgggtatgtcttcagataaactctagacagaagcattctcagaaacttctttgggatgttgcattcaagtcacagagtagaacattcccattcatagagcagatttgaaacactctttttgtagtatctggaagtggacatttggagcgctttcaggcctatgttgaaaaaggaaatatcttcccataaaaactagacggaagcattctcagaaacttacttgtgatgtgtttgctcaactaacagaattgaaccatcgttttaaaggagcagttttgaaacactgttttcgtggaatctgcaagtggatatttggctagctttgaggatttcgttggaaacgggattacatataaaaaggagacagcagcattctcagaaacttctttatgatgtctgcattcaagtcacagagttgagcattccctttcatagagcaggttggaaacactctttgtgtagtatctggatgaggacatttggagcgctttcaggcgtatggtgaaaaaggaaatatcttcccgtaaaaactagacagaagcattctcagaagtttatttgtgatgtgtgccctcaactaacagaagttgaacctttcttttgatagagcagttttgaaacactctttttgtaaaatctgcaagaggatatttggatagctttgaggatttcgttgcaaacgggaatggcttcatataaactctagacagaagcattctcagaaacttcgttgggatgtttcgattgaagtcccagtgttgaacattcccttttatagagcaggttggaaacactctttctgcattccctggaagtggacatttggagcgctttcaggacgacggtgaaaatggaaatatcttccaagaaaatctagatagaagcaatgtcagaaacttttatgtgatggatctactcagctaacagagttgaagctttcttttgagagagcagttttgcaacactctttttgtggaatatgcaagtggatattagggcagctttgaggatttcgttggaaacgggaatacatgtaaaaagcagacagcagcattctcagaaacttctttgtgatgtttgcattgaagtcacagagttgaacattccctttgagagagcaggtttgaaacacgccttttgtcatatctggaagtgtccattcggagcgcattcaggcttgtgttgaaaaaggaaatatcctcccataaaaactagacagaagcattctcagaaacttatctgtgatgtatgtactcaactaacagaactaaaccatcgttttgaaggagcagttttgaaacactctttttgcggaatctgcaagtggatatttggctagctgggaggatttcgttggaaacgggattacatacaaaaagcagacagcagcattctcagaaacttatttgtgatgtgtgccctcaactgacagtgttgaacctttgttttgatagagcagttctgaaacacactttttgtaaaatctgcaagaggatatttggatagctttgaggatttcgttggaaacgggaatgtcttcatgtaaactctagacagaagcattctcagaaactgctttgggatgtttcaattgaagtcccagtgttgaacattcccattcatagagcaggtttgaaacactctttttgtactatctggaagtggacatttggagcgctttcaggtctacggtgaaaaaggagatatcttccaataaaaactagatagaagcaatgtcagaacttttttcatgatgtatctactcagcaaacagagttgaacctttcttttgagggagcagttttgaaacactatttttgtggaatatgcaagtgggtattaggccagcttggaggatttcgttggaaacgggaatacgtataaaaagcagacagcagcattgtcagaaactactttgtgatgtttgcattcaagtcacagaattgaacactccctttcacagagcaggtttgaaacactctttttgtagtgtctgtaagtgaacatttggattgctttcaggcctaaggtgaaaaaggaaatatcttcccataaaaactagacagaagcattctcagaaactagtttgtgatgtgtgccctctactgacagagttgaacctttctttgcaaagagcagttttgaaacactctttttgtagaatctgcaagaggatatttggatagctttgaggatttcttgggaaacgggaatgtcttcagataaactctagacagaagcattctcagaaacttctttgggatgtttcaattgaagtcacagtgttgaacattccctttcacagagcaggtttgaaacactctttttgtagtgtctataagtgaacatttggcgtgctttcaggcctaacgtgaaaaaggaaatatcttcccataaaaactagacagaagcattctcagaaacttgttcgtgatgtgtgccctctactgacagagttgaacctttctttgcaaagagcagctttgaaacactctttttgtagaatctgcaagaggatatttggatagctttgaggatttcgttggaaacgggtatgtcttcagataaactctagacagaagcattctcagaaacttctttgggatgtttcaattgaagtcacagtgttgaacattccctttcacagagcaggtttgaaacactctttttgtagtgtctataagtgaacatttggcgtgctttcaggcgtaacgtgaaaaaggaaatatcttcccataaaaactagacggaagcattctcagaaacttgttcgtgatgtgtgccctctactgacagagttgaaccctttctttgcaaagagcagctttgaaacacactttttgtagaatctgcaagaggatatttggatagctttgaggatttcgttggaaacgggtatgtcttcagataaactctagacagaagcattctcagaaacttctttgggatgttgcattcaagtcacagagtagaacattcccattcatagagcagatttgaaacactctttttgtagtatctggaagtggacatttggagcgctttcaggcctatgttgaaaaaggaaatatcttcccataaaaactagacggaagcattctcagaaacttacttgtgatgtgtttgctcaactaacagaattgaaccatcgttttgaaggagcagttttgaaacactgttttcgtggaatctgcaagtggatatttggctagctttgaggatttcgttggaaacgggattacatataaaaaggagacagcagcattctcagaaacttctttgtgatgtttgcattcaagtcacagagttgaacattccctttcatagagcaggtttgaaacactctttttgtagtatctggatgtggacatttggatcgctttcaggcctatggtgaaaaaggaaatatcttcccatgaaaactagacagaagcattctcagaaacttatttgtgatgtgtgccctcaactgacagtgttgaacctttgttttgatagagcagttctgaaacacactttttgtaaaatctgcaagaggatatttggatagctttgaggatttcgttggaaacgggaatgtcttcttgtaaactctagacagaagcattctcagaaactgctttgggatgtttcaattgaagtcccagtgttgaacattccctttcatagagcaggtttgaaacactctttttgtactatctggaagtggacatttggagcgctttcaggtctacggtgaaaaaggagatatcttccaataaaaactagatagaagcaatgtcagaacttttttcatgatgtatctactcagcaaacagagttgaacctttcttttgagagagcagttttgaaacactctttttgtggaatatgcaagtgggtatttggccagcttggaggatttcgttggaaacgggaatacgtataaaaagcagacagccagcattgtcagaaaactactttgtgatgtttgcattcaagtcacagaattgaacactccctttcacagagcaggtttgaaacactctttttgtagtgtctgtaagtgaacatttggattgctttcaggcctaaggtgaaaaaggaaatatcttcccataaaaattagacagaagcattctcagaaacttgtttgtgatgtgtgccctctactgacagagttgaacctttctttgcaaagagcagttttgaaacactctttttgtagaatctgcaagaggatatttggatagctttgaggatttcttgggaaacgggaatgtcttcagataaactctagacagaagcattctcagaaacttctttgggatgtttcaattgaagtcacagtgttgaacattccctttcacagagcaggtttgaaacactctttttgtagtgtctataattgaacatttggcgtgctttcaggcctaacgtgaaaaaggaaatatcttcccataaaaactagacagaagcattctcagaaacttgttcgtgatgtgtgccctctactgacagagttgaacctttctttgcaaagagcagctttgaaacactctttttgtagaatctgcaagaggatatgtggatagctttgaggatttcgttggaaacgggtatgtcttcagataaactctagacagaagcattctcagaaacttctttgggatgtttcaattgaagtcacagtgttgaacattccctttcacagagcaggtttgaaacactctttttgtagtgtctataagtgaacatttggcgtgctttcaggcctaacgtgaaaaaggaaatatcttcccataaaaactagacagaagcattctcagaaacttgttcgtgatgtgtgccctctactgacagagttgaacctttctttgcaaagagcagctttgaaacacactttttgtagaatctgcatgaggatatttggatagctttgaggatttcgttggaaacgggtatgtcttcagataaactctagacagaagcattctcagaaacttctttgggatgttgcatgcaagtcacagagtagaacattcccattcatagagcagatttgaaacactctttttgtagtatctggaagtggacatttggagcgctttcaggcctatgttgaaaaaggaaatatcttcccataaaaactagacggaagcattctcagaaacttatttgtgatgtgtttgctcaactaacaggattgaaccatccttttgaaggagcagttttgaaacactgttttcgtggaatctgcaagtggatatttggctagctttgaggatttcgttggaaacgggattacatataaaaaggagacagcagcattctcagaaacttctttgtgatgtttgcattcaagtcacagagttgaacattccctttcatagagcaggtttgaaacactctttttgtagtatctggatgtggacatttggatcgctttcaggcctatggtgaaaaaggaaatatcttcccatgaaaactagacagaagcattctcagaaacttatttgtgatgtgtgccctcaactgacagtgttgaacctttgttttgatagagcagttctgaaacacactttttgtaaaatctgcaagaggatatttggatagatttgaggatttcgttggaaacgggaatgtcttcatgtaaactctacacagaagcattctcagaaactgctttgggatgtttcaattgaagtcccagtgttgaacattcccattcatagagcaggtttgaaacactctttttgtactatctggaagtggacatttggagcgctttcaggtctacggtgaaaaaggagatatcttccaataaaaactagatagaagcaatgtcagaacttttttcatgatgtatctactcagcaaacagagttgaacctttcttttgagagagcagttttgacactgtctttgtggaatatgcaagtgggtattaggccagcttggaggatttcgttggaaacgggaatacgtataaaaagcagacagcagcattgtcagaaactactttgtgatgtttgcattcaagtcacagaattgaacactccctttcacagagcaggtttgaaacactctttttgtagtgtctgtaagtgaacatttggattgctttcaggcctaaggtgaaaaaggaaatatcttcccataaaaactagacagaagcattctcagaaacttgtttgtgatgtgtgccctctactgacagagttgaacctttctttgcaaagagcagttttgaaacactctttttgtagaatctgcaagaggatatttggatagctttgaggatttcttgggaaacgggaatgtcttcagataaactctagacagaagcattctcagaaacttctttgggatgtttcaattgaagtcacagtgttgaacattccctttcacagagcaggtttgaaacactctttttgtagtgtctataagtgaacatttggcgtgctttcaggcctaacgtgaaaaaggaaatatcttcccataaaaactagacagaagcattctcagaaacttgtttgtgatgtgtgccctctactgacagagttgaacctttctttgcaaagagcagctttgaaacactctttttgtagaatctgcaagaggatatttggatagctttgaggatttcgttggaaacgggtatgtcttcacataaactctagacagaagcattctcagaaacttctttgggatgttgcattcaagtcacagagtagaacattcccattcatagagcagatttgaaacactctttttgtagtatctggaagtggacatttggagcgctttcaggcctatgttgagaaacgaaatatcttcccataaaaactagacggaagcattctcagaaacttatttgtgatgtgtttgctcaactaacaggattgaaccatcgttttgaaggagcagttttgaaacactgttttcgtggaatctgcaagtggatatttggctagctttgaggatttcgttggaaacgggattacatataaaaaggagacagcagcattctcagaaacctctttgtgatgtctgcattcaagtcacagagttgagcattccctttcatagagcaggttggaaacactctttttgtagtatctggatgaggacatttggagcgctttcaggcgtatggtgaaaaaggaaatatcttcccgtaaaaactagacagaagcattctcagaagtttatttgtgatgtgtgccctcaactaacagagttgaacctttcttttgatagagcagttttgaaacactctttttgtaaaatctgcaagaggatatttggatagctttgaggatttcgttgcaaacgggaatggcttcatataaactctagacagaagcattctcagaaacttcgttgggatgtttcgattgaagtcccagtgttgaacattcccttttatagagcaggttggaaacactctttctgcattccctggaagtggacatttggagcgctttcaggacgacggtgaaaatggaaatatcttccaagaaaatctagatagaagcaatgtcagaaacttttatgtgatggatctactcagctaacagagttgaacctttcttttgagagagcagttttgcaacactctttttgtggaatatgcaagtggatattagggcagctttgaggatttcgttggaaacgggaatacatgtaaaaagcagacagcagcattctcagaaacttctttgtgatgtttgcattgaagtcacagagttgaacattccctttgagagagcaggtttgaaacacgccttttgtcatatctggaagtgtccattcggagcgcattcaggcttgtgttgaaaaaggaaatatcctcccataaaaactagacagaagcattctcagaaacttatctgtgatgtatgtactcaactaacagaactaaaccatcgttttgaaggagcagttttgaaacactctttttgcggaatctgcaagtggatatttggctagctgggaggatttcgttggaaacgggattacatacaaaaagcagacagcagcattctcagaaacttatttgtgatgtgtgccctcaactgacagtgttgaacctttgttttgatagagcagttctgaaacacactttttgtaaaatctgcaagaggatatttggatagctttgaggatttcgttggaaacgggaatgtcttcatgtaaactctacacagaagcattctcagaaactgctttgggatgtttcaattgaagtcccagtgttgaacattcccattcatagagcaggtttgaaacactctttttgtactatctggaagtggacatttggagcgctttcaggtctacggtgaaaaaggagatatcttccaataaaaagtagatagaagcaatgtcagaacttttttcatgatgtatctactcagctaacagagttgaacctttcttttgagagagcagttttgaaacactctttttgtggaatatgcaagtgggtattaggccagcttggaggatttcgttggaaacgggaatacgtataaaaagcagacagcagcattgtcagaaactactttgtgatgtttgcattcaagtcacagaattgaacactccctttcacagagcaggtttgaaacactctttttgtagtgtctgtaagtgaacatatggattgctttcaggcctaaggtgaaaaaggaaatatcttcccataaaaactagacagaagcattctcagaaacttgtttgtgatgtgtgccctctactgacagagttgaacctttctttgcaaagagcagttttgaaacactctttttgtagaatctgcaagaggatatttggatagctttgaggatttcttgggaaacgggaatgtcttcagataaactctagacagaagcattctcagaaacttctttgggatgtttcaattgaagtcacagtgttgaacattccctttcacagagcaggtttgaaacactctttttgtagtgtctataagtgaacatttggcgtgctttcaggcctaacgtgaaaaaggaaatatcttcccataaaaactagacagaagcattctcagaaacttgttcgtgatgtgtgccctctactgacagagttgaacctttctttgcaaagagcagctttgaaacacactttttgtagaatctgcaagaggatatttggatagctttgaggatttcgttggaaacgagtatgtcttcagataaactctagacagaagcattctcagaaacttctttgggatgttgcattcaagtcacagagtagaacattcccattcatagagcagatttgaaacactctttttgtagtatctggaagtggacatttggagcgctttcaggcctatgttgaaaaaggaaatatcttcccataaaaactagacggaagcattctcagaaacttatttgtgatgtgtttgctcaactaacaggattgaaccatcgttttgaaggagcagttttgaaacactgttttcgtggaatctgcaagtggatatttggctagctttgaggatttcgttggaaacgggattacatataaaaaggagacagcagcattctcagaaacttctttgtgatgtttgcattcaagtcacagagttgaacattccctttcatagagcaggtttgaaacactctttttgtagtatctggatgtggacatttggatcgctttcaggcctatggtgaaaaaggaaatatcttcccatgaaaactagacagaagcattctcagaaacttatttgtgatgtgtgccctcaactgacagtgttgaacctttgttttgatagagcagttctgaaacacactttttgtaaaatctgcaagaggatatttggatagctttgaggatttcgttggaaacgggaatgtcttcatgtaaactctagacagaagcattctcagaaactgctttgggatgtttcaattgaagtcccagtgttgaacattcccattcatagagcaggtttgaaacactctttttgtactatctggaagtggacatttggagcgctttcaggtctacggtgaaaaaggagatatcttccaataaaaactagatagaagcaatgtcagaacttttttcatgatgtatctactcagcacacagagttgaacctttcttttgagagagcagttttgaaacactctttttgtggaatatgcaagtgggtattaggccagcttggaggatttcgttggaaacgggaatacgtataaaaagcagacagcagcattgtcagaaactactttgtgatgtttgcattcaagtcacagaattgaacactccctttcacagggcaggtttgaaacactctttttgtagtgtctgtaagtgaacatttggattgctttcaggcctaaggtgaaaaaggaaatatcttcccataaaaactagacagaagcattctcagaaacttgtttgtgatgtgtgccctctactgacagagttgaaactttctttgcaaagagcagttttgaaacactctttttgtagaatctgcaagaggatatttggatagctttgaggatttcttgggaaacgggaatgtcttcagataaactctagacagaagcattctcagaaacttctttgggatgtttcaattgaagtcagtgttgaacattccctttcacagagcaggtttgaaacactctttttgtagtgtctataagtgaacatttggcgtgctttcaggcgtaacgtgaaaaaggaaatatcttcccataaaaactagacagaagcattctcagaaacttgttcttgatgtgtcccctctactgacagagttgaacctttctttgcaaagagcagctttgaaacactctttttgtaggatctgcaagaggatatttggatagcttggaggatttcgttggaaacgggtatgtcttcagataaactctagacagaagcattctcagaaacttctttgggatgttgcattcaagtcacagagtagaacattcccattcatagagcagatttgaaacactctttttgtagtatctggaagtggacatttggagcgctttcaggcctatgttgaaaaaggaaatatcttcccataaaaactagacggaagcattctcagaaacttacttgtgatgtgtttgctcaactaacagaattgaaccatcgttttgaaggagcagttttgaaacactgttttcgtggaatctgcaagtggatatttggctagctttgaggatttcgttggaaacgggattacatataaaaaggagacagcagcattctcagaaacttctttgtgatgtttgcattcaagtcacagagttgaacattccctttcatagagcaggtttgaaacactctttttgtagtatctggatgtggacatttggatcgctttcaggcctatggtgaaaaaggaaatatcttcccatgaaaactagacagaagcattctcagaaacttatttgtgatgtgtgccctcaactgacagtgttgaacctttgttttgatagagcagttctgaaagacactttttgtgaaatctgcaagaggatatttggatagctttgaggatttcgttggaaacgggaatgtcttcatgtaaactctagacagaagcattctcagaaactgctttgggatgtttcaattgaagtcccagtgttgaacattcccattcatagagcaggtttgaaacactctttttgtactatctggaagtggacatttggagcgctttcaggtctacggtgaaaaaggagatatcttccaataaaaactagatagaagcaatgtcagaacttttttcatgatgtatctactcagcaaacagagttgaacctttcttttgagagagcagttttgaaacactctttttgtggaatatgcaagtgggtattaggccagcttggaggatttcgttggaaacgggaatacgtataaaaagcagacagcagcattgtcagaaactactttgtgatgtttgcattcaagtcacagaattgaacactccctttcacagagcaggtttgaaacactctttttgtagtgtctgtaagtgtacatttggattgctttcaggcctaaggtgaaaaaggaaatatcttcccataaaaactagacagaagcattctcagaaacttgtttgtgatgtgtgccctctactgacaggagttgaacctttctttgcaaagagcagttttgaaacactctttttgtagaatctgcaagaggatatttggatagctttgaagatttcttgggaaacgggaatgtcttcagataaactctagacagaagcattctcagaaacttctttgggatgtttcaattgaagtcacagtgttgaacattccctttcacagagcaggtttgaaacactctttttgtagtgtctataagtgaacatttggcgtgctttcaggcctaacgtgaaaaaggaaatatcttcccataaaaactagacagaagcattctcagaaacttgttcgtgatgtgtgccctctactgacagagttgaacctttctttgcaaagagcagctttgaaacactctttgtgtagaatctgcaagaggatatttggatagctttgaggatttcgttggaaacgggtatgtcttcagataaactctagacagaagcattctcagaaacttctttgggatgttgcattcaagtcacagagtagaacattcccattcatagagcagatttgaaacactctttttgtagtatctggaagtggacatttggagcgctttcaggcctatgttgaaaaaggaaatatcttcccataaaaactagacggaagcattctcagaaacttatttgtgatgtgtttgctcaactaacaggattgaaccatcgttttgaaggagcagttttgaaacactgttttcgtggaatctgcaagtggatatttggctagctttgaggatttcgttggaaacgggattacatataaaaaggagacagcagcattctcagaaacttctttgtgatgtctgcattcaagtcacagagttgagcattccctttcatagagcaggttggaaacactctttttgtagtatctggatgaggacatttggagcgctttcaggcctatggtgaaaaaggaaatatcttcccgtaaaaactagacagaagcattctcagaagtttatttgtgatgtgtgccctcaactaacagacttgaacctttcttttgatagagcagttttgaaacactcattttgtaaaatctgcaagaggatatttggatagctttgaggatttcgttgcaaacgggaatggcttcatataaactctagacagaagcattctcagaaacttcgttgggatgtttcgattgaagtcccagtgttgaacattcccttttatagagcaggttggaaacactctttctgcattccctggaagtggacatttggagcgctttctggacgacggtgaaaatggaaatatcttccaagaaaatctagatagaagcaacgtcagaaacttttatgtgatggatctactcagctaacagagttgaacctttcttttgagagagcagttttgcaacactctttttgtggaatatgcaagtggatattagggcagctttgaggatttcgttggaaacgggaatacatgtaaaaagcagacagcagcattctcagaaacttctttgtgatgtttgcattgaagtcacagagttgaacattccctttgagagagcaggtttgaaacacgccttttgtcatatctggaagtgtccattcggagcgcattcaggcttgtgttgaaaaaggaaatatcctcccataaaaactagacagaagcattctcagaaacttatctgtgatgtatgtactcaactaacagaactaaaccatcgttttgaaggagcagttttgaaacactctttttgcggaatctgcaagtggatatttggctagctgggaggatttcgttggaaacgggattacatacaaaaagcagacagcagcattctcagaaacttatttgtgatgtgtgccctcaactgacagtgttgaacctttgttttgatagagcagttctgaaacacactttttgtaaaatctgcaagaggatatttggatagctttgaggatttcgttggaaacggtaatgtcttcatgtaaactctagacagaagcattctcagaaactgctttgggatgtttcaattgaagtcccagtgttgaacattccctttcatagagcaggtttgaaacactctttttgtagtatctggatgaggacatttggagcgctttcaggcgtatggtgaaaaaggaaatatcttcccgtaaaaactagacagaagcattctcagaagtttatttctgatgtgtgccctcaactaacagagttgaacctttcttttgatagagcagttttgaaacactctttttgtaaaatctgcaagaggatatttggatagctttgaggatttcgttgcaaacggaatggcttcatataaactctagacagaagcattctcagaaacttcgttgggatgtttcgattgaagtcccagtgttgaacattcccttttatagagcaggttggaaacactctttctgcattccctggaagtggacatttggagcgctttcaggacgacggtgaaaatggaaatatcttccaataaaatctagatagaagcaacgtcagaaacttttatgtgatggatctactcagctaacagagttgaacctttcttttgagagagcagttttgcaacactctttttgtggaatatgcaagtggatattagggcagctttgaggatatcgttggaaacgggaatacatgtaaaaagcagacagcagcattctcagaaacttctttgtgatgtttgcattgaagtcacagaagttgaacattccctttgagagagcaggtttgaaacacgccttttgtcatatctggaagtgtccattcagagcgcattcaggcttgtgttgaaaaaggaaatatcctcccataaaaactagacagaagcattctcagaaacttatctgtgatgtatgtactcaactaacagaactaaaccatcgttttgaaggagcagttttgaaacactctttttgcggaatctgcaagtggatatttggctagctgggaggatttcgttggaaacgggattacatacaaaaagcagacagcagcattctcagaaacttatttgtgatgtgtgccctcaactgacagtgttgaacctttgttttgatagagcagttctgaaacacactttttgtaaaatctgcaagaggatatttggatagctttgaggatttcgttggaaacgggaatgtcttcatgtaaactctagacagaagcattctcagaaactgctttgggatgtttcaattgaagtcccagtgttgaacattcccattcatagagcaggtttgaaacactctttttgtactatctggaagtggacatttggagcgctttcaggtctacggtgaaaaaggagatatcttccaataaaaactagatagaagcaatgtcagaacttttttcatgatgtatctactcagcaaacagagttgaacctttcttttgagagagcagttttgaaacactctttttgtggaatatgcaagtgggtattaggccagcttggaggatttcgttggaaacgggaatacgtataaaaagcagacagcagcattgtcagaaactactttgtgatgtttgcattcaagtcacagaactgaacactccctttcacagagcaggtttgaaacactctttttgtagtgtctgtaagtgaacatttggattgctttcaggcctaaggtgaaaaaggaaatatcttcccataaaaactagacagaagcattctcagaaacttgtttgtgatgtgtgccctctactgacagagttgaacctttctttgcaaagagcagttttgaaacactctttttgtagaatctgcaagaggatatttggatagctttgaagatttcttgggaaacgggaatgtcttcagataaactctagacagaagcattctcagaaacttctttgggatatttcaattgaagtcacagtgttgaacattccctttcacagagcaggtttgaaacactctttttgtagtgtgtataagtgaacatttcgcgtgctttcaggcctaacgtgaaaaaggaaatatcttcccataaaaactagacagaagcattctcagaaacttgttcgtgatgtgtgccctctactgacagagttgaacctttctttgcaaagagcagctttgaaacactctttttgtagaatctgcaagaggatatttggatagctttgaggatttcgttggaaacgggtatgtcttcagataaactctagacagaagcattctcagaaacttctttgggatgttgcatgcaagtcacagagtagaacattcccattcatagagcagatttgaaacactctttttgtagtatctggaagtggacaattggagcgctttcaggcctatgttgaaaaaggaaatatcttcccataaaaactagacggaagcattctcagaaacttacttgtgatgtgtttgctcaactaacagaattgaaccatcgttttgaaggagcagttttgaaacactgttttcgtggaatctgcaagtggatatttggctagctttgaggatttcattggaaaagggattacatataaaaaggagacagcagcattctcagaaacttctttgtgatgtctgcattcaagtcacagatttgagcattccctttcatagagtaggtttgaaaccctctttttgtagtatctggatgaggacatttggagcgctttcaggcgtatggtgataaaggaaatatcttcccgtaaaaactagacagannnnnnnnnnnnnnnnnnnnnnnnnnnnnnnnnnnnnnnnnnnnnnnnnnnnnnnnnnnnnnnnnnnnnnnnnnnnnnnnnnnnnnnnnnnnnnnnnnnnttgcagtgagctgagatcaggccactgcactccagcctgggcagcagagtgatactctgtctcaaaaatacaaaaaatggtaatgaattatggttactgtttcttgataaactcatattttttttgaacactgtgctaggcactttgctagtggctcattaattctttgcaatcatgtgtgaaatgtctcaactaacagagttgaacctttcttttgatagagcagttttgaaacactctttttgtaaaatctgcaagaggatatttggatagctttgaggatttcgttgcaaacgggaatggcttcatataaactctagacagaagagcattctcagaaacttcgttgggatgtttcgattgaagtcccagtgttgaacattcccttttatagagcaggttggaaacactctttctgcattccctggaagtggacatttggagcgctttcaggacgacggtgaaaatggaaatatcttccaagaaaatctagatagaagcaacgtcagaaacttttctgtgatggatctactcagctaacagagttgaacctttcttttgagagagcagttttgcaacactctttttgtggaatatgcaagtggatattagggcagctttgaggatttcgttggaaacgggaatacatgtaaaaagcagacagcagcattctcagaaacttctttgtgatgtttgcattgaagtcacagagttgaacattccctttgagagagcaggtttgaaacacgccttttgtcatatctggaagtgtccattcggagcgcattcaggcttgtgttgaaaaaggaaatatcctcccataaaaactagacagaagcattctcagaaacttatctgtgatgtatgtactcaactaacagaactaaaccatcgttttgaaggagcagttttgaaacactctttttgcggaatctgcaagtggatatttggctagctgggaggatttcgttggaaacgggattacatacaaaaagcagacagcagcattctcagaaacttatttgtgatgtgtgccctcaactgacagtgttgaacctttgttttgatagagcagttctgaaacacactttttgtaaaatctgcaagaggatatttggatagctttgaggatttcgttggaaacgggaatgtcttcatgtaaactctagacagaaggattctcagaaaatgctttgggatgtttcaattgaagtcccagtgttgaacattccctttcatagagcaggtttgaaacactctttttgtagtatctggaagtggacatttggagcgctttcaggtctacggtgaaaaaggagatatcttccaataaaaactagatagaaagcaatgtcagaacttttttcatgatgtatctactcagcaaacagagttgaacctttcttttgagggagcagttttgaaacactatttttgtggaatatgcaagtgggtattaggccagcttggaggatttcgttggaaacggtaatacgtataaaaagcagacagcagcattgtcagaaactactttgtgatgtttgcattcaagtcacagaattgaacactccctttcacagagcaggtttgaaacactctttttgtagtgtctgtaagtgaacatttggattgctttcaggcctaaggtgaaaaaggaaatatcttcccataaaaactagacagaagcattctcagaaacttgtttgtgatgtgtgccctctactgacagagttgaacctttctttgcaaagagcagttttgaaacactctttttgtagaatctgcaagaggatatttggatagctttgaggatttcttgggaaacgggaatgtcttcagataaactctagacagaagcattctcagaaacttctttgggatgtttcaattgaagtcacagtgttgaacattccctttcacagagcaggtttgaaacactctttttgtagtgtctataagtgaacatttggcgtgctttcaggcgtaacgtgaaaaaggaaatatcttcccataaaaactagacagaagcattctcagaaacttgttcgtgatgtgtgccctctactgacagagttgaacctttctttgcaaagagcagctttgaaacacactttttgtagaatctgcaagaggatatttggaaagctttgaggatttcgttggaaacgggtatgtcttcagataaactctagacagaagcattctcagaaacttctttgggatgttgcatgcaagtcacagagtagaacattcccattcatagagcagatttgaaacactctttttgtagtatctggaagtggacatttggagcgctttcaggcctatgttgaaaaaggaaatatcttcccataaaaactagacggaagcattctcagaaacttatttgtgatgtgtttgctcaactaacaggattgaaccatcgttttgaaggagcagttttgaaacactgttttcgtggaatctgcaagtggatatttggctagctttgaggatttcgttggaaacgggattacatataaaaaggagacagcagcattctcagaaacttctttgtgatgtctgcattcaagtcacagagttgagcattccctttcatagagcaggtttgaaacactgtttttgtagtatctggatgaggacatttggagcgctttcaggtgtatggtgaaaaaggaaatatcttcccgtaaaaactagacagaagcattctcagaaatttatttgtgatgtgtgccctcaactaacagagttgaacctttcttttgatagagcagttttgaaacactctttttgtaaaatctgcaagaggatatttggatagctttgaggatttcgttgcaaacgggaatggcttcatataaactctagacagaagcattctcagaaacttcgttgggatgtttcgattgaagtcccagtgttgaacattcccttttatagagcagattggaaacactctttttgcattccctggaagtggacatttggagcgctttcaggacgacggtgaaaatggaaatatcttccaagaaaatctagatagaagcaatgtcagaaacttttatgtgatggatctactcagctaacagagttgaagctttcttttgagagagcagttttgcaacactctttttgtggaatatgcaagtggatattagggcagctttgaggatttcgttggaaacgggaatacatgtaaaaagcagacagcagcattctcagaatcttctttgtgatgtttgcattgaagtcacagagttgaacattccctttgagagagcagggttgaaacacgccttttgtcatatctggaagtgtccattcggagcgcatacaggcttgcgatgaaaaaggaaatatcctcccataaaaactagacagaagcattctcagaaacttatctgtgatgtatgtactcaactaacagaactaaaccatcgttttgaaggagcagttttgaaacactctttttgcggaatctgcaagtggatatttggctagctgggaggatttcgttggaaacgggattacatacaaaaagcagacagcaagcattctcagaaacttatttgcgatgtgtgccctcaactgacagtgttgaacctttgttttgatagagcagttctgaaacacactttttgtaaaatctgcaagaggatatttggatagctttgaggatttcgttggaaacgggaatgtcttcatgtaaactctggacagagcattctcagaaactgctttgggatgtttcaattgaagtcccagtgttgaacattcccattcatagagcaggtttgaaacactctttttgtactatctggaagtggacatttggagcgctttcaggtctacggtgaaaaaggagatatcttccaataaaaactagatagaagcaatgtcagaacttttttcatgatgtatctactcagcaaacagagttgaacctttcttttgagagagcagttttgaaacactctttttgtggaatatgaaagtgggtattaggccagcttggaggatttcgttggaaacgggaatacgtataaaaagcagacagcagcattgtcagaaactactttgtgatgtttgcattcaagtcacagaattgaacactccctttcacagagcaggtttgaaacactctttttgtagtgtctgtaagtgaacatttggattgctttcaggcctaaggtgaaaaaggaaatatcttcccataaaaactagacagaagcattctcagaaacttgtttgtgatgtgtgccctctactgacagagttgaacctttctttgcaaagagcagttttgaaacactctttttgtagaatctgcaagaggatatttggatagctttgaagatttcttgggaaacgggaatgtcttcagataaactctagacagaagcattctcagaaacttctttgggatgtttcaattgaagtcacagtgttgaacattccctttcacagagcaggtttgaaacactctttttgtagtgtctataagtgaacatttggcgtgctttcaggcctaacgtgaaaaaggaaatatcttcccataaaaactagacagaagcattctcagaaacttgttcgtgatgtgtgccctctactgacagagttgaacctttctttgcaaagagcagctttgaaacactctttttgtagaatctgcaagaggatatttggatagcttggaggatttcgttggaaacgggtatgtcttcagataaactctagacagaagcattctcagaaacttctttgggatgttgcattcaagtcacagagtagaacattcccattcatagagcagatttgaaacactctttttgtagtatctggaagtggacatttggagcgctttcaggcctatgttgaaaaaggaaatatcttgccataaaaactagacggaagcattttcagaaacttacttgtgatgtgtttgctcaactaacagaattgaaccatcgttttgaaggagcacttttgaaacactgttttcgtggaatctgcaagtggatatttggctagctttgaggatttcgttggaaacgggattacctataaaaaggagacagcagcattctcagaaacttctttgtgatgtttgcattcaagtcacagagttgaacattccctttcatagagcaggtttgaaacactctttttgtagtatctggatgtggacatttggatcgctttcaggcctatggtgaaaaaggaaatatcttcccatgaaaactagacagaagcattctcagaaacttatttgtgatgtgtgccctcaactgacagtgttgaacctttgttttgatagagcagttctgaaacacactttttgtaaaatctgcaagaggatatttggatagctttgaggagttcgttggaaacgggaatgtcttcatgtaaactctagacagaagcattctcagaaactgctttgggaggtttcaattgaagtcccagtgttgaacattccctttcatagagcaggtttgaaacactctttttgtactatctggaagtggacatttggagcgctttcaggtctacggtgaaaaaggagatatcttccaataaaaactagatagaagcaatatcagaacttttttcatgatgtatctactcagcaaacagagttgaacctttcttttgagagagcagttttgaaacactctttttgtggaatatgcaagtgggtattaggccagcttggaggatttcgttggaaacgggaatacgtataaaaagcagacagcagcattgtcagaaactactttgtgatgtttgcattcaagtcacagaattgaacactccctttcacagagcaggtttgaaacactctttttgtagtgtctgtaagtgaacatttggattgctttcaggcctaaggtgaaaaaggaaatatcttcccataaaaactagacagaagcattctcagaaacttgtttgtgatgtgtgccctctactgacagagttgaacctttctttgcaaagagcagttttgaaacactctttttgtagaatctgcaagaggatatttggatagctttgaggatttcttgggaaacgggaatgtcttcagataaactctagacagaagcattctcagaaacttctttgggatgtttcaattgaagtcacagtgttgaacattccctttcacagagcaggtttgaaacactctttttgtagtgtctataagtgaacatttggcgtgctttcaggcctaacgtgaaaaaggaaatatcttcccataaaaactagacagaagcattctcagaaacttgttcatgatgtgtaccctctactgacagagttgaacctttctttgaaaagagcagctttgaaacactctttttgtagaatctgcaagaggatatttggatagctttgaggatttcgttggaaacgggtatgtcttcagataaactctagacagaagcattctcagaaacttctttgggatgttgcatgcaagtcacagagtagaacattcccattcatagagcagatttgaaacactctttttgtagtatctggaagtggacatttggagcgctttcaggcctatgttgaaaaaggaaatatcttcccataaaaactagacggaagcattctcagaaacttacttgtgatgtgtttgctcaactaacagaattgaaccatcgttttgaaggagcagttttgaaacactgttttcgtggaatctgcaagtggatatttggctagctttgaggatttcgttggaaacgggattacatataaaaaggagacagcagcattctcagaaacttctttgtgatgtttgcattcaagtcacagagttgaacattccctttcatagagcaggtttgaaacactctttttgtagtatctggatgtggacatttggatcgctttcaggcctatggtgaaaaaggaaatatcttcccatgaaaactagacagaagcattctcagaaacttattggtgatgtgtgccctcaactgacagtgttgaacctttgttttgatagagcacttctgaaacacactttttgtaaaatctgcaagaggatatttggatagctttgaggatttcgttggaaacgggaatgtcttcatgtaaactctacacagaagcattctcagaaactgctttgggatgtttcaattgaagtcccagtgttgaacattcccattcatagagcaggtttgaaacactctttttgtactatctggaagtggacatttggagcgctttcaggtctacggtgaaaaaggagatatcttccaataaaaactagatagaagcaatgtcagaacttttttcatgatgtatctactcagcaaacagagttgaacctttcttttgagagagcagttttgaaacactctttttgtggaatatgcaagtgggtattaggccagcttggaggatttcgttggaaacgggaatacgtataaaaagcagacagcagcattgtcagaaactactttgtgatgtttgcattcaagtcacagaattgaacactccctttcacagagcaggtttgaaacactctttttgtagtgtctgtaagtgaacatttggattgatttcaggcctaaggtgaaaaaggaaatatcttcccataaaaactagacagaagcattctcagaaacttgtttgtgatgtgtgccctctactgacagagttgaacctttctttgcaaagagcagttttgaaacactctttttgtagaatctgcaagaggatatttggatagctttgaggatttcttgggaaacgggaatgtcttcagataaactctagacagaagcattctcagaaacttctttgggatgtttcaattgaagtcacagtgttgaacattccctttcacagagcaggtttgaaacactctttttgtagtgtctataagtgaacatttggcgtgctttcaggcgtaacgtgaaaaaggaaatatcttcccataaaaactagacagaagcattctcagaaacttgttcgtgatgtgtgccctctactgacagagttgaacctttctttgcaaagagcagttttgaaacactctttttgtagaatctgcaagaggatatatggatagctttgaggatttcgttggaaacgggaatgtcttcagataaactctagacagaagcattctcagaaacttctttgggatgtttcaattgaagtcacagtgttgaacattccctttcacagagcaggtttgaaacactctttttgtagtgtctataagtgaacatttggcgtgctttcaggcctaacgtgaaaaaggaaatatcttcccataaaaactagacagaagcattctcagaaacttgttcttgatgtgtcccctctactgacagagttgaacctttctttgcaaagagcagctttgaaacactctttttgtagaatctgcaagaggatatttggatagcttggaggatttcgttggaaacgggtatgtcttcagataaactctagacagaaacattctcagaaacttctttgggatgttgcattcaagtcacagagtagaacattcccatgcatagagcagatttgaaacactctttttgtagtatctggaagtggacatttggagcgctttcaggcctatgttgaaaaaggaaatatcttcccataaaaactagacgggaagcattctcagaaacttatttgtgatgtgtttgctcaactaacaggattgaaccatcgttttgaaggagcagttttgaaacactgttttcgtggaatctgcaagtggatatttggctagctttgaggatttcgttggaaacgggattacatataaaaaggagacagcagcattctcagaaacttctttgtgatgtctgcattcaattcacagagttgagcattccctttcatagagcaggttggaaactctctttttgtagtatctggatgaggacatttggagcgctttcaggcgtatggtgaaaaaggaaatatcttcccgtaaaaactagacagaagcattctcagaaatttatttgtgatgtgtgccctcaactaacagagttgaacctttcttttgatagagcagttttgaaacactctttttgtaaaatctgcaagaggatatttggatagctttgaggatttcgttgcaaacgggaatggcttcatataaactctagacagaagcattctcagaaacttctttgggatgtttcgattgaagtcccagtgttgaactttcccttttatagagcaggttggaaacactctttctgcattccctggaagtggacatttggagcgctttcaggacgacagtgaaaatggaaatatcttccaataaaatctagatagaagcaacgtcagaaacttttatgtgatggatctactcagctaacagagttgaacctttcttttgagagagcagttttgcaacactctttttgtggaatatgcaagtggatattagggcagctttgaggatttcgttggaaacgggaatacatgtaaaaagcagacagcagcattctcagaaacttctttgtgatgtttgcattgaagtcacagagttgaacattccctttgagagagcaggtttgaaacacgccttttgtcatatctggaagtgtccattcggagcgcattcaggcttgtgttgaaaaaggaaatatcctcccataaaaactagacagaagcattctcagaaacttatctgtgatgtatgtactcaactaacagaactaaaccatcgttttgaaggagcagttttgaaacactctttttgcggaatctgcaagtggatatttggctagctgggaggatttcgttggaaacgggattacatacaaaaagcagacagcagcattctcagaaacttatttgtgatgtgtgccctcaactgacagtgttgaacctttgttttgatagagcagttctgaaacacactttttgtaaaatctgcaagaggatatttggatagctttgaggatttcgttggaaacgggaatgtcttcatgtaaactctacacagaagcattctcagaaactgctttgggatgtttcaattgaagtcccagtgttgaacattccctttcatagagcaggtttgaaacactctttttgtactatctggaagtggacatttggagcgctttcaggtctacggtgaaaaaggagatatcttccaataaaaactagatagaagcaatgtcagaacttttttcatgatgtatctactcagcaaacagagttgaacctttcttttgagagagcagttttgaaacactctttttgtggaatatgcaagtgggtattaggccagcttggaggatttcgttggaaacgggaatacgtataaaaagcagacagcagcattgtcagaaactactttgtgatgtttgcattcaagtcacagaactgaacactccctttcacagagcaggtttgaaacactctttttgtagtgtctgtaagtgaacatttggattgctttcaggcctaaggtgaaaaaggaaatatcttcccataaaaactagacagaagcattctcagaaacttgtttgtgatgtgtgccctctactgacagagttgaacctttctttgcaaagagcagttttgaaacactctttttgtagaatctgcaagaggatatttggatagctttgaggatttcttgggaaacgggaatgtcttcagataaactctagacagaagcattctcagaaacttctttgggatgtttcaattgaagtcacagtgttgaacattccctttcacagagcaggtttgaaacactctttttgtagtgtctataagtgaacatttggcgtgctttcaggcgtaacgtgaaaaaggaaatatcttcccataaaaaccagacagaagcattctcagaaacttgttcgtgatgtgtgccctctactgacagagttgaacctttctttgcaaagagcagctttgaaacactctttttgtagaatctgcaagaggatatttggatagcttggaggatttcgttggaaacgggtatgtcttcagataaactctagacagaagcattctcagaaacttctttgggatgttgcattcaagtcacagagtagaacattcccattcatagagcagatttgaaacactctttttgtagtatctggaagtggacatttggagcgctttcaggcctatgttgaaaaaggaaatatcttcccataaaaactagacggaagcattctcagaaacttatttgtgatgtgtttgctcaactaacaggattgaaccatcgttttgaaggagcagttttgaaacactgttttcgtggaatctgcaagtggatatttggctagctttgaggatttcgttggaaacgggattacatataaaaaggagacagcagcattctcagaaacttctttgtgatgtttgcattcaagtcacagagttgaacattccctttcatagagcaggtttgaaacactctttttgtagtatctggatgtggacatttggatcgctttcaggcctatggtgaaaaaggaaatatcttcccatgaaaactagacagaagcattctcagaaacttatttgtgatgtgtgccctcaactgacagtgttgaacctttgttttgatagagcagttctgaaacacactttttgtaaaatctgcaagaggatatttggatagctttgaggatttcgttggaaacggaaatgtcttcatgtaaactctacacagaagcattctcagaaactgctttgggatgtttcaattgaagtcccagtgttgaacattcccattcatagagcaggtttgaaacactctttttgtactatctggaagtggacatttggagcgctttcaggtctacggtgaaaaaggagatatcttccaataaaaactagatagaagcaatgtcagaacttttttcatgatgtatctactcagcaaacagagttgaacctttcttttgagggagcagttttgaaacactatttttgtggaatatgcaagtgggtattaggccagcttggaggatttcgttggaaacgggaatacgtataaaaagcagacagcagcattgtcagaaactactttgtgatgtttgcattcaagtcacagaattgaacactccctttcacagagcaggtttgaaacactctttttgtagtgtctgtaagtgaacatttggattgatttcaggcctaaggtgaaaaaggaaatatcttcccataaaaactagacagaagcattctcagaaacttgtttgtgatgtgtgccctctactgacagagttgaacctttctttgcaaagagcagttttgaaacactctttttgtagaatctgcaagaggatatttggatagctttgaggatttctttggaaacgggaatgtcttcagataaactctagacagaagcattctcagaaacttctttgggatgtttcaattgaagtcacagtgttgaacattccctttcacagagcaggtttgaaacactctttttgtagtgtctataagtgaacatttggcgtgctttcaggcctaacgtgaaaaaggaaatatcttcccataaaaactagacagaagcattgtcagaaacttgttcatgatgtgtgccctctactgacagagttgaacctttctttgcaaagagcagctttgaaacactctttttgtagaatctgcaagaggatatttggatagcttttaggatttcgttggaaacgggtatgtcttcagataaactctagacagaagcattctcagaaacttctttgggatgttgcattcaagtcacagagtagaacattcccattcatagagcagatttgaaacactctttttgtagtatctggaagtggacatttggagcgctttcaggcctatgttgaaaaaggaaatatcttcccataaaaactagacggaagcattctcagaaacttatttgtgatgtgtttgctcaactaacaggattgaaccatcgttttgaaggagcagttttgaaacactgttttcgtggaatctgcaagtggatatttggctagctttgaggatttcgttggaaacgggattacatataaaaaggagacagcagcattctcagaaacttctttgtgatgtttgcattcaagtcacagagttgaacattccctttcatagagcaggtttgaaacactctttttgtagtatctggatgtggacatttggatcgctttcaggcctatggtgaaaaaggaaatatcttcccatgaaaactagacagaagcattctcagaaacttatttgtgatgtgtgccctcaactgacagtgttgaacctttgttttgatagagcagttctgaaacacactttttgtaaaatctgcaagaggatatttggatagcttttaggatttcgttggaaacgggaatgtcttcatgtaaactctagacagaagcattctcagaaactgctttgggatgtttcaattgaagtcccagtgttgaacattcccattcatagagcaggtttgaaacactctttttgtactatctggaagtggacatttggagcgctttcaggtctacggtgaaaaaggagatatcttccaataaaaactagatagaagcaatgtcagaacttttttcatgatgtatctactcagcaaacagagttgaacctttcttttgagggagcagttttgaaacactatttttgtggaatatgcaagtgggtattaggccagcttggaggatttcgttggaaacgggaatacgtataaaaagcagacagcagcattgtcagaaactactttgtgatgtttgcattcaagtcacagaattgaacactccctttcacagagcaggtttgaaacactctttttgtagtgtctgtaagtgaacatttggattgctttcaggcctaaggtgaaaaaggaaatatcttcccataaaaactagacagaagcattctcagaaacttgtttgtgatgtgtgccctctactgacggagttgaacctttctttgcaaagagcagttttgaaacactctttttgtagaatctgcaagaggatatttggatagctttgaggatttcttgggaaacgggaatgtcttcagataaactctagacagaagcattctcagaaacttctttgggatgtttcaattgaagtcacagtgttgaacattccctttcacagagcaggtttgaaacactctttttgtagtgtctataagtgaacatttggcgtgctttcaggcgtaacgtgaaaaaggaaatgtcttcccataaaaactagacagaagcattctcagaaacttgttcatgatgtgtgccctctactgacagagttgaacctttctttgcaaagagcagctttgaaacactctttttgtagaatctgcaagaggatatttggatagctttgaggatttcgttggaaacgggtatgtcttcagataaactctagacagaagcattctcagaaacttctttgggatgttgcatgcaagtcacagagtagaacattcccattcatagagcagatttgaaacactctttttgtagtatctggaagtggacatttggagcgctttcaggcctatgttgaaaaaggaaatatcttcccataaaaactagacggaagcattctcagaaacttatttgtgatgtgtttgctcaactaacaggattgaaccatcgttttgaaggagcagttttgaaacactgttttcgtggaatctgcaagtggatatttggctagctttgaggatttcgttggaaacgggattacatatacaaaggagacagcagcattctcagaaacttctttgtgatgtctgcattcaattcacagagttgagcattccctttcatagagcaggttggaaacactctttttgtagtatctggatgaggacatttggagcgctttcaggcgtatggtgaaaaaggaaatatcttcccgtaaaaactagacagaagcattctcagaagtttatttgtgatgtgtgccctcaactaacagagttgaacctttcttttgatagagcagttttgaaacactctttttgtaaaatctgcaagaggatatttggatagctttgaggatttcgttgcaaacgggaatggcttcatataaactctagacagaagcattctcagaaacttcgttgggatgtttcgattgaagtcccagtgttgaacattcccttttatagagcaggttggaaacactctttctgcattccctggaagtggacatttggagcgctttcaggacgacggtgaaaatggaaatatcttccaagaaaatctagatagaagcaacgtcagaaacttttctgtgatggatctactcagctaacagagttgaacctttcttttgagagagcagttttgcaacactctttttgtggaatatgcaagtggatattagggcagctttgaggatttcgttggaaacgggaatacatgtaaaaagcagacagcagcattctcagaaacttgtttgtgatgtttgcattgaagtcacagagttgaacattccctttgagagagcaggtttgaaacacgccttttgtcatatctggaagtgtccattcggagcgcattcaggcttgtgttgaaaaaggaaatatcctcccataaaaactagacagaagcattctcagaaacttatctgtgatgtatgtactcaactaacagaactaaaccatcgttttgaaggagcagttttgaaacactctttttgcggaatctgcaagtggatatttggctagctgggaggatttcgttggaaacgggattacatacaaaaagcagacagcagcattctcagaaacttctttgtgatgtttgcattcaagtcacagagttgaacattccctttcatagagcaggtttgaaacactctttttgtagtatctggatgtggacatttggatcgctttcaggcctatggtgaaaaaggaaatatcttcccatgaaaactagacagaagcattctcagaaacttatttgtgatgtgtgccctcaactgacagtgctgaacctttgttttgatagagcagttctgaaacacactttttgtaaaatctgcaagaggatatttggatagctttgaggatttcgttggaaacgggaatgtcttcatgtaaactctacacagaagcattctcagaaactgctttgggatgtttcaattgaagtcccagtgttgaacattcccattcatagagcaggtttgaaacactctttttgtactatctggaagtggacatttggagcgctttcaggtctacggtgaaaaaggagatatcttccaataaaaactagatagaagcaatgtcagaacttttttcatgatgtatctactcagcaaacagagttgaacctttcttttgagagagcagttttgaaacactccttttgtggaatatgcaagtgggtattaggccagcttggaggatttcgttggaaacgggaatacgtataaaaagcagacagcagcattgtcagaaactactttgtgatgtttgcattcaagtcacagaattgaacactccctttcacagagcaggtttgaaactctctttttgtagtgtctgtaagtgaacatttggattgctttcaggcctaaggtgaaaaaggaaatatcttcccatataaactagacagaagcattctcagaaacttgtttgtgatgtgtgccctctactgacagagttgaacctttcttttcaaagagcagttttgaaacactctttttgtagaatctgcaagaggatatttggatagctttgaggatttcttgggaaacgggaatgtcttcagataaactctagacagaagcattctcagaaacttctttgggatgtttcaattgaagtcacagtgttgaacattccctttcacagagcaggtttgaaacactctttttgtagtgtctataagtgaacatttggcgtgctttcaggcgtaacgtgaaaaaggaaatatcttcccataaaaactagacagaagcattctcagaaacttgttagtgatgtgtgccctctactgacagagttgaacctttctttgcaaagagcagctttgaaacacactttttgtagaatctgcaagaggatatttggatagctttgaggatttcgttggaaacgggtatgtcttcagataaactctagacagaagcattctcagaaacttctttgggatgttgcatgcaagtcacagagtagaacattcccattcatagagcagatttgaaacactctttttgtagtatctggaagtggacatttggagcgctttcaggcctatgttgaaaaaggaaatatcttcccataaaaactagacggaagcattctcagaaacttatttctgatgtgtttgctcaactaacagaattgaaccatcgttttgaaggagcagttttgaaaccctgttttcgtggaatctgcaagtggatatttggctagctttgaggatttcgttggaaacgggattacctataaaaaggagacagcagcattctcagaaacttctttgtgatgtttgcattcaagtcacagagttgaacattccctttcatagagcaggtttgaaacactctttttgtagtatctggatgtggacatttggatcgctttcaggcctatggtgaaaaaggaaatatcttcccatgaaaactagacagaagcattctcagaaacttatttgtgatgtgtgccctcaactgacagtgttgaacctttgttttgatagagcagttctgaaacacactttttgtaaaatctgcaagaggatatttggatagctttgaggatttcgttggaaacgggaatgtcttcatgtaaacttctagacagaagcattctcagaaactgctttgggatgtttcaattgaagtcccagtgttgaacattccctttcatagagcaggtttgaaacactctttttgtactatctggaagtggacatttggagcgctttcaggtctacggtgaaaaaggagatatcttccaataaaaactagatagaagcaatgtcagaacttttttcatgatgtatctactcagcaaacagagttgaacctttcttttgagagagcagttttgaaacactctttttgtggaatatgcaagtgggtattaggccagcttggaggatttcgttggaaacgggaatacgtataaaaagcagacagcagcattgtcagaaactactttgtgatgtttgcatgcaagtcacagaatggaacactgcctttcacagagcaggtttgaaacactctttttgtagtgtctgtaagtgaacatttggattgctttcaggcctaaggtgaaaaaggaaatatcttcccataaaaactagacagaagcattctcagaaacttgtttgtgatgtgtgccctctactgacagagttgaacctttctttgcaaagagcagttttgaaacactctttttgtagaatctgcaagaggatatttggatagctttgaagatttcttgggaaacgggaatgtcttcagataaactctagacagaagcattctcagaaacttctttgggatgtttcaattgaagtcacagtgttgaacattccctttcacagagcaggtttgaaacactctttttgtagtgtctataagtgaacatttggcgtgctttcaggcctaacgtgaaaaaggaaatatcttcccataaaaactagacagaagcattctcagaaacttgttcgtgatgtgtgccctctactgacagagttgaacctttctttgcaaagagcagctttgaaacactctttttgtagaatctgcaagagggtatttggatagcttggaggatttcgttggaaacgggtatgtcttcagataaactctagacagaagcattctcagaaacttctttgggatgttgcattcaagtcacagagtagaacattcccattcatagagcagatttgaaacactctttttgtagtttctggaagtggacatttggagcgctttcaggcctatgttgaaaaaggaaatatcttcccataaaaactagacggaagcattctcagaaacttacttgtgatgtgtttgctcaactaacagaattgaaccatcgttttgaaggagcagttttgaaacactgttttcgtggaatctgcaagtggatatttggctagctttgaggatttcgttggaaacgggattacatataaaaaggagacagcagcattctcagaaacttctttgtgatgtctgcattcaattcacagagttgagcattccctttcatagagcaggttggaaacactctttttgtagtatctggatgaggacatttggagcgctttcaggcgtatggtgaaaaaggaaatatcttcccgtaaaaactagacagaagcattctcagaagtttatttctgatgtgtgccctcaactaacagagttgaacctttcttttgatagagcagttttgaaacactctttttgtaaaatctgcaagaggatatttggatagctttgaggatttcgttgcaaacgggaatggcttcatataaactctagacagaagcattctcagaaacttcgttgggatgtttcgattgaagtcccagtgttgaacattcccttttatagagcaggttggaaacactctttttgcattccctggaagtggacatttggagcgctttcaggacgacggtgaaaatggaaatatcttccaagaaaatctagatagaagcaatgtcagaaacttttctgtgatggatctactcagctaacagagttgaacctttcttttgagagagcagttttgcaacactctttttgtggaatatgcaagtggatattagggcagctttgaggatttcgttggaaacgggaatacatgtaaaaagcagacagcagcattctcagaaacttctttgtgatgtttgcattcaagtcacagagttgaacattccctttgagagagcaggtttgaaacacgccttttgtcatatctggaagtgtccattcggagcgcattcaggcttgtgttgaaaaaggaaatatcctcccagaaaaactagacagaagcattctcagaaacttatctgtgatgtatgtactcaactaacagaactaaaccatcgttttgaaggagcagttttgaaacactctttttgcggaatctgcaagtggatatttggctagctgggaggatttcgttggaaacgggattacatacaaaaagcagacagcagcattctcagaaacttatttgtgatgtgtgccctcaactgacagtgttgaacctttgttttgatagagcagttctgaaacacactttttgtaaaatctgcaagaggatatttggatagctttgaggatttcgttggaaacgggaatgtcttcatgtaaactctagacagaagcattctcagaaactgctttgggatgtttcaattgaagtcccagtgttgaacattccctttcatagagcaggtttgaaacactctttttgtactatctggaagtggacatttggagcgctttcaggtctacggtgaaaaaggagatatcttccaataaaaactagatagaagcaatgtcagaacttttttcatgatgtatctactcagcaaacagagttgaacctttcttttgagagagcagttttgaaacactctttttgtggaatatgcaagtgggtattaggccagcttggaggatttcgttggaaacgggaatacgtataaaaagcagacagcagcattgtcagaaactactttgtgatgtttgcattcaagtcacagaactgaacactccctttcacagagcaggtttgaaacactctttttgtagtgtctgtaagtgaacatttggattgctttcaggcctaaggtgaaaaaggaaatatcttcccataaaaactagacagaagcattctcagaaacttgtttgtgatgtgtgccctctactgacagagttgaacctttctttgcaaagagcagttttgaaacactctttttgtagaatctgcaagaggatatttggatagctttgaggatttcttgggaaacgggaatgtcttcagataaagtctagacagaagcattctcagaaacttctttgggatgtttcaattgaagtcacagtgttgaacattccctttcacagagcaggtttgaaacactctttttgtagtgtctataagtgaacatttggcgtgctttcaggcctaacgtggaaaaggaaatatcttcccataaaaactagacagaagcattctcagaaacttgttcgtgatgtgtgccctctactgacagagttgaacctttctttgcaaagagcagctttgaaacactctttttgtagaatctgcaagaggatatttggatagctttgaggatttcgttggaaacgggtatgtcttcagataaactctagacagaaacattctcagaaacttctttgggatgttgcattcaagtcacagagtagaacattcccatgcatagagcagatttgaaacactctttttgtagtatctggaagtggacatttggagcgctttcaggcctatgttgaaaaaggaaatatcttcccataaaaactagacgggaagcattctcagaaacttatttgtgatgtgtttgctcaactaacaggattgaaccatcgttttgaaggagcagttttgaaacactgttttcgtggaatctgcaagtggatatttggctagctttgaggatttcgttggaaacgggattacatataaaaaggagacagcagcattctcagaaacttctttgtgatgtttgcattcaagtcacagagttgaacattccctttcatagagcaggtttgaaacactctttttgtagtatctggatgtggacatttggatcgctttcaggcctatggtgaaaaaggaaatatcttcccatgaaaactagacagaagcattctcagaaacttatttgtgatgtgtgccctcaactgacagtgttgaacctttgttttgatagagcagttctgaaacacactttttgtaaaatctgcaagaggatatttggatagctttgaggatttcgttggaaacgggaatgtcttcatgtaaacttctagacagaagcattctcagaaactgctttgggatgtttcaattgaagtcccagtgttgaacattccctttcatagagcaggtttgaaacactctttttgtactatctggaagtggacatttggagcgctttcaggtctacggtgaaaaaggagatatcttccaataaaaactagatagaagcaatgtcagaacttttttcatgatgtatctactcagcaaacagagttgaacctttcttttgagagagcagttttgaaacactctttttgtggaatatgaaagtgggtattaggccagcttggaggatttcgttggaaacgggaatacgtataaaaagcagacagcagcattgtcagaaactactttgtgatgtttgcattcaagtcacagaattgaacactccctttcacagagcaggtttgaaacactctttttgtagtgtctgtaagtgaacatatggattgctttcaggcctaaggtgaaaaaggaaatatcttcccataaaaactagacagaagcattctcagaaacttgtttgtgatgtgtgccctctactgacagagttgaacctttctttgcaaagagcagttttgaaacactctttttgtagaatctgcaagaggatatttggatagctttgaggatttcttgggaaacgggaatgtcttcagataaactctagacagaagcattctcagaaacttctttgggatgtttcaattgaagtcacagtgttgaacattccctttcacagagcaggtttgaaacactctttttgtagtgtctataagtgaacatttggcgtgctttcaggcgtaacgtgaaaaaggaaatatcttcccataaaaactagacagaagcattctcagaaacttgttcgtgatgtgtgccctctactgacagagttgaacctttctttgcaaagagcagctttgaaacacactttttgtagaatctgcaagaggatatttggatagctttgaggatttcgttggaaacgggtatgtcttcagatatactctagacagaagcattctcagaaacttctttgggatgttgcattcaagtcacagagtagaacattcccattcatagagcagatttgaaacactctttttgtagtatctggaagtggacatttggagcgctttcaggcctatgttgaaaaaggaaatatcttcccataaaaactagacggaagcattctcagaaacttatttgtgatgtgtttgctcaactaacaggattgaaccatcgttttgaaggagcagttttgaaacactgttttcgtggaatctgcaagtggatatttggctagctttgaggatttcgttggaaacgggattacatataaaaaggagacagcagcattctcagaaacttctttgtgatgtttgcattcaagtcacagagttgaacattccctttcatagagcaggtttgaaacactctttttgtagtatctggatgtggacatttggatcgctttcaggcctatggtgaaaaaggaaatatcttcccatgaaaactagacagaagcattctcagaaacttatttgtgatgtgtgccctcaactgacagtgttgaacctttgttttgatagagcagttctgaaacacactttttgtaaaatctgcaagaggatatttggatagctttgaggatttcgttggaaaagggaatgtcttcatgtaaactctagacagaagcattctcagaaactgctttgggatgtttcaattgaagtcccagtgttgaacattccctttcatagagcaggtttgaaacactctttttgtagtatctggatgaggacatttggagcgctttcaggcgtttggtgaaaaaggaaatatcttcccgtaaaaactagacagaagcaatgtcagaacttttttcatgatgtatctactcagcaaacagagttgaacctttcttttgagagagcagttttgaaacactccttttgtggaatatgcaagtgggtattaggccagcttggaggatttcgttggaaacgggaatacgtataaaaagcagacagcagcattgtcagaaactactttgtgatgtttgcatgcaagtcacagaatggaacactgcctttcacagagcaggtttgaaacactctttttgtagtgtctgtaagtgaacatttggattgctttcaggcctaaggtgaaaaaggaaatatcttcccataaaaactagacagaagcattctcagaaacttgtttgtgatgtgtgccctctactgacagagttgaacctttctttgcaaagagcagttttgaaacactctttttgtagaatctgcaagaggatatttggatagctttgaggatttcttgggaaacgggaatgtcttcagataaactctagacagaagcattctcagaaacttctttgggatgtttcaattgaagtcacagtgttgaacattccctttcacagagcaggtttgaaacactctttttgtagtgtctataagtgaacatttggcgtgctttcaggcctaacgtgaaaaaggaaatatcttcccataaaaactagacagaagcattctcagaaacttgttcgtgatgtgtgccctctactgatagagttgaacctttctttgcaaagagcagctttgaaacacactttttgtagaatctgcaagaggatatttggatagctttgaggatttcgttggaaacgggtatgtcttcagataaactctagacagaagcattctcagaaacttctttgggatgttgcattcaagtcacagagtagaacattcccattcatagagcagatttgaaacactctttttgtagtatctggaagtggacatttggagcgctttcaggcctatgttgaaaaaggaaatatcttcccataaaaactagacggaagcattctcagaaacttatttgtgatgtgtttgctcaactaacaggattgaaccatcgttttgaaggagcagttttgaaacactgttttcatggaatctgcaagtggatatttggctagctttgaggatttcgttggaaacgggattacatatacaaaggagacagcagcattctcagaaacttctttgtgatgtctgcattcaagtcacagagttgagcattccctttcatagagcaggttggaaacactctttttgtagtatctggatgaggacatttggagcgctttcaggcgtatggtgaaaaaggaaatatcttcccgtaaaaactagacagaagcattctcagaaatttatttgtgatgtgtgccctcaactaacagagttgaacctttcttttgatagagcagttttgaaacactctttttgtaaaatctgcaagaggatatttggatagctttgaggatttcgttgcaaacgggaatggcttcatataaaatctagacagaagcattctcagaaacttcgttgggatgtttcgattgaagtcccagtgttgaacattcccttttatagagcaggttggaaacactctttctgcattccctggaagtggacatttggagcgctttcaggacgacggtgaaaatggaaatatcttccaagaaaatctagatagaagcaacgtcagaaacttttctgtgatggatctactcagctaacagagttgaacctttcttttgagagagcagttttgcaacactctttttgtggaatatgcaagtggatattagggcagctttgaggatttcgttggaaacgggaatacatgtaaaaagcagacagcagcattctcagaaacttctttgtgatgtttgcattgaagtcacagagttgaacattccctttgagagagcaggtttgaaacacgccttttgtcatatctggaagtgtccattcggagcgcattcaggcttgtgttgaaaaaggaaatatcctcccataaaaactagacagaagcattctcagaaacttatctgtgatgtatgtactcaactaacagaactaaaccatcgttttgaaggagcagttttgaaacactctttttgcggaatctgcaagtggatatttggctagctgggaggatttcgttggaaacgggattacatacaaaaagcagacagcagcattctcagaaacttatttgtgatgtgtgccctcaactgacagtgttgaacctttgttttgatagagcagttctgaaacacactttttgtaaaatctgcaagaggatatttggatagctttgaggatttcgttggaaacgggaatgtcttcatgtaaactctagacagaagcattctcagaaactgctttgggatgtttcaattgaagtcccagtgttgaacattcccattcatagagcaggtttgaaacactctttttgtactatctggaagtggacatttggagcgctttcaggtctacggtgaaaaaggagatatcttccaataaaaactagatagaagcaatgtcagaacttttttcatgatgtatctactcagctaacagagttgaacctttcttttgagagagcagttttgaaacactctttttgtggaatatgcaagtgggtattaggccagcttggaggatttcgttggaaacgggaatacgtataaaaagcagacagcagcattgtcagaaactactttgtgatgtttgcattcaagtcacagaattgaacactccctttcacagagcaggtttgaaacactctttttgtagtgtctgtaagtgaacatttggattgccttcaggcctaaggtgaaaaaggaaatatcttcccataaaaactagacagaagcattctcagaaacttgtttgtgatgtgtgccctctactgacagagttgaacctttctttgcaaagagcagttttgaaacactctttttgtagaatctgcaagaggatatttggatagctttgaggatttcttgggaaacgggaatgtcttcagataaactctagacagaagcattctcagaaacttctttgggatgtttcaattgaagtcacagtgttgaacattccctttcacagagcaggtttgaaacactctttttgtagtgtctataattgaacatttggcgtgctttcaggcctaacgtgaaaaaggaaatatcttcccataaaaactagacagaagcattctcagaaacttgttcgtgatgtgtgccctctactgacagagttgaacctttctttgcaaagagcagctttgaaacactctttttgtagaatctgcaagaggatatgtggatagctttgaggatttcgttggaaacgggtatgtcttcagataaactctagacagaagcattctcagaaacttctttgggatgtttcaattgaagtcacagtgttgaacattccttttcacagagcaggtttgaaacactctttttgtagtgtctataagtgaacatttggcgtgctttcaggcctaacgtgaaaaaggaaatatcttcccataaaaactagacagaagcattctcagaaacttgttcgtgatgtgtgccctctactgacagagttgaacctttctttgcaaagagcagctttgaaacactctttttgtagaatctgcaagaggatatttggatagctttgaggatttcgttggaaacgggtatgtcttcagataaactctagacagaagcattctcagaaacttctttgggatgttgcattcaagtcacagagtagaacattcccattcatagagcagatttgaaacactctttttgtagtatctggaagtggacatttggagcgctttcaggcctatgttgaaaaaggaaatatcttcccataaaaactagacggaagcattctcagaaacttatttgtgatgtgtttgctcaactaacaggattgaaccatcgttttgaaggagcagttttgaaacactgttttcgtggaatctgcaagtggatatttggctagctttgaggatttcgttggaaacgggattacatataaaaaggagacagcagcattctcagaaacttctttgtgatgtttgcattcaagtcacagagttgaacattccctttcatagagcaggtttgaaacactctttttgtagtatctggatgtggacatttggatcgctttcaggcctatggtgaaaaaggaaatatcttcccatgaaaactagacagaagcattctcagaaacttatttgtgatgtgtgccctcaactgacagtgttgaacctttgttttgatagagcagttctgaaacacactttttgtaaaatctgcaagaggatatttggatagctttgaggatttcgttggaaacgggaatgtcttcatgtaaactctagacagaagcattctcagaaactgctttgggatgtttcaattgaagtcccagtgttgaacattcccattcatagagcaggtttgaaacactctttttgtactatctggaagtggacatttggagcgctttcaggtctacggtgaaaaaggagatatcttccaataaaaactagatagaagcaatgtcagaacttttttcatgatgtatctactcagcaaacagagttgaacctttcttttgagagagcagttttgaaacactctttttgtggaatatgcaagtgggtattaggccagcttggaggatttcgttggaaacgggaatacgtataaaaagcagacagcagcattgtcagaaactactttgagatgtttgcattcaagtcacagaattgaacactccctttcacaaagcaggtttgaaacactctttttgtagtgtctgtaagtgaacatttggattgctttcaggcctaaggtgaaaaaggaaatatcttcccataaaaactagacagaagcattctcagaaacttgtttgtgatgtgtgccctctactgacagagttgaacctttctttgcaaagagcagttttgaaacactctttttgtagaatctgcaagaggatatttggatagctttgaggatttcttgggaaacgggaatgtcttcagataaactctagacagaagcattctcagaaacttctttgggatgtttcaattgaagtcacagtgttgaacattccctttcacagagcaggtttgaaacactctttttgtagtgtctataagtgaacatttggcgtgctttcaggcctaacgtgaaaaaggaaatatcttcccataaaaactagacagaagcattctcagaaacttgttcttgatgtgtcccctctactgacagagttgaacctttctttgcaaagagcagctttgaaacactctttttgtagaatctgcaagaggatatttggatagcttggaggatttcgttggaaacgggtatgtcttcagataaactccagacagaagcattctcagaaacttctttgggatgttgcattcaagtcacagagtagaacattcccattcatagagcagatttgaaacactctttttgtagtatctggaagtggacatttggagcgctttcaggcctatgttgaaaaaggaaatatcttcccataaaaactagacggaagcattctcagaaacttatttgtgatgtgtttgctcaactaacaggattgaaccatcgttttgaaaggagcagttttgaaacactgttttcgtggaatctgcaagtggatatttggctagctttgaggatttcgttggaaacgggattacatataaaaaggagacagcagcattctcagaaacttctttgtgatgtctgcattcaattcacagagttgagcattccctttcatagagcaggttggaaacactctttttgtagtatctggatgaggacatttggagcgctttcaggcgtatggtgaaaaaggaaatatcttcccgtaaaaactagacagaagcattctcagaagtttatttgtgatgtgtgccctcaactaacagacttgaacctttcttttgatagagcagttttgaaacactcattttgtaaaatctgcaagaggatatttggatagctttgaggatttcgttgcaaacgggaatggcttcatataaactctagacagaagcattctcagaaacttcgtcgggatgtttcgattgaagtcccagtgttgaacattcccttttatagagcaggttggaaacactctttctgcattccctggaagtggacatttggagcgctttcaggacgacggtgaaaatggaaatatcttccaataaaatctggatagaagcaatgtcagaaacttttatgtgatggatctactcagctaacagtagttgaacctttcttttgagagagcagttttgcaacactctttttgtggaatatgcaagtggatattagggcagctttgaggatttcgttggaaacgggaatacatgtaaaaagcagacagcagcattctcagaaacttctttgtgatgtttgcattgaagtcacagagttgaacattccctttgagagagcaggtttgaaacacgccttttgtcatatctggaagtgtccattcggagcgcattcaggcttgtgttgaaaaaggaaatatcctcccataaaaactagacagaagcattctcagaaacttatctgtgatgtatgtactcaactaacagaactaaaccatcgttttgaaggagcagttttgaaacactctttttgcggaatctgcaagtggatatttggctagctgggaggatttcgttggaaacgggattacatacaaaaagcagacagcagcattctcagaaacttatttgtgatgtgtgccctcaactgacagtgttgaacctttgttttgatagagcagttctgaaacacactttttgtaaaatctgcaagaggatatttggatagctttgaggatttcgttggaaacgggaatgtcttcatgtaaactctacacagaagcattctcagaaactgctttgggatgtttcaattgaagtcccagtgttgaacattcccattcatagagcaggtttgaaacactctttttgtactatctggaagtggacatttggagcgctttcaggtctacggtgaaaaaggagatatcttccaataaaaactagatagaagcaatgtcagaacttttttcatgatgtatctactcagcaaacagagttgaacctttcttttgagagagcagttttgaaacactctttttgtggaatatgcaagtgggtattaggccagcttggaggatttcgttggaaacgggaatacgtataaaaagcagacagcagcattgtcagaaactactttgtgatgtttgcattcaagtcacagaattgaacactccctttcacagagcaggtttgaaacactctttttgtagtgtctgtaagtgaacatttggattgctttcaggcctaaggtgaaaaaggaaatatcttcccataaaaactagacagaagcattctcagaaacttgtttgtgatgtgtgccctctactgacagagttgaacctttctttgcaaagagcagttttgaaacactctttttgtagaatctgcaagaggatatttggatagctttgaggatttcttgggaaacgggaatgtcttcagataaactctagacagaagcattctcagaaacttctttgggatgtttcaattgaagtcacagtgttgaacattccctttcacagagcaggtttgaaacactctttttgtagtgtctataagtgaacatttggcgtgctttcaggcctaacgtgaaaaaggaaatatcttcccataaaaactagacagaagcattctcagaaacttgttcgtgatgtgtgccctctactgacagagttgaacctttctttgcaaagagcagctttgaaacactctttttgtagaatctgcaagaggatatttggatagctttgaggatttcgttggaaacggggatgtcttcagataaactctagacagaagcattctcagaaacttctttgggatgttgcattcaagtcacagagtagaacattcccattcatagagcagatttgaaacactctttttgtagtatctggaagtggacatttggagcgctttcaagcctatgttgaaaaaggatatatcttcccataaaaactagacggaagcattctcagaaacttacttgtgatgtgtttgctcaactaacagaattgaaccatcgttttaaaggagcagttttgaaacactgttttcgtggaatctgcaagtggatatttggctagctttgaggatttcgttggaaacgggattacatataaaaaggagacagcagcattctcagaaacttctttgtgatgtctgcattcaagtcacagagttgagcattccctttcatagagcaggtttgaaacactctttttgtagtatctggatgaggacatttggagcgctttcaggcgtatggtgaaaaaggaaatatcttcccgtaaaaactagacagaagcattctcagaaatttatttgtgatgtgtgccctcaactaacagagttgaacctttcttttgatagagcagttttgaaacactctttttgtaaaatctgcaagaggatatttggatagctttgaggatttcgttgcaaacgggaatggcttcatataaactctagacagaagcattctcagaaacttcgttgggatgttgcgattgaagtcccagtgttgaacattcccttttatagagcaggttggaaacactctttctgcattccctggaagtggacatttggagcgctttcaggacgacggtgaaaatggaaatatcttccaataaaatctagatagaagcaacgtcagaaacttttatgtgatggatctactcagctaacagagttgaacctttcttttgagagagcagttttgcaacactctttttgtggaatatgcaagtggatattagggcagctttgaggatttcgttggaaacgggaatacatgtaaaaagcagacagcagcattctcagaaacttctttgtgatgtttgcattgaagtcacagagttgaacattccctttgagagagcaggtttgaaacacgccttttgtcatatctggaagtgtccattcggagcgcattcaggcttgtgttgaaaaaggaaatatcctcccataaaaactagacagaagcattctcagaaacttatctgtgatgtatgtactcaactaacagaactaaaccatcgttttgaaggagcagttttgaaacactctttttgcggaatctgcaagtggatatttggctagctgggaggatttcgttggaaacgggattacatacaaaaagcagacagcagcattctcagaaacttatttgtgatgtgtgccctcaactgacagtgttgaacctttgttttgatagagcagttctgaaacacactttttgtaaaatctgcaagaggatatttggatagctttgaggatttcgttggaaacgggaatgtcttcatgtaaactctacacagaagcattctcagaaactgctttgggatgtttcaattgaagtcccagtgttgaacattccctttcatagagcaggtttgaaacactctttttgtagtatctggatgaggacatttggagcgctttcaggcgtatggtgaaaaaggaaatatcttcccgtaaaaactagacagaagcattctcagaagtttatttctgatgtgtgccctcaactaacagagttgaacctttcttttgatagagcagttttgaaacactctttttgtaaaatctgcaagaggatatttggatagctttgaggatttcgttgcaaacggaatggcttcatataaactctagacagatgcattctcagaaacttcgttgggatgtttcgattgaagtcccagtgttgaacattcccttttatagagcaggttggaaacactctttaggcattccctggaagtggccaattggagcgcattcaggacgacggtgaaaatggaaatatcttccaagaaaatctagatagaagcaacgtcagaaacttttatgtgatggatctactcagctaacagagttgaacctttcttttgagagagcagttttgcaacactctttttgtggaatatgcaagtggatattaaggcagctttgaggatttcgttggaaacgggaatacatgtaaaaagcagacagcagcattctcagaaacttctttgtgatgtttgcattgaagtcacagagttgaacattccctttgagagagcaggtttgaaacacgccttttgtcatatctggaagtgtccattcggatcgcattcaggcttgtgttgaaaaaggaaatatcctcccagaaaaactagacagaagcattctcagaaacttatctgtgatgtatgtactcaactaacagaactaaaccatcgttttgaaggagcagttttgaaacactctttttgcggaatctgcaagtggatatttggctagctgggaggatttcgttggaaacgggattacatacaaaaagcagacagcagcattctcagaaacttatttgtgatgtgtgccctcaactgacagtgttgaacctttgttttgatagagcagttctgaaacacactttttgtaaaatctgcaagaggatatttggatagctttgaggatttcgttggaaacgggaatgtcttcatgtaaactctagacagaagcattctcagaaactgctttgggatgtttcaattgaagtcccagtgttgaacattcccattcatagagcaggtttgaaacactctttttgtactatctggaagtggacatttggagcgctttcaggtctacggtgaaaaaggagatatcttccaataaaaactagatagaagcaatgtcagaacttttttcatgatgtatctactcagcaaacagagttgaacctttcttttgagagagcagttttgaaacactctttttgtggaatatgcaagtgggtattaggccagcttggaggatttcgttggaaacgggaatacgtataaaaagcagacagcagcattgtcagaaactactttgtgatgtttgcattcaagtcacagtaattgaacactccctttcacagagcaggtttgaaacactctttttgtagtgtctgtaagtgaacatttggattgctttcaggcctaaggtgaaaaaggaaatatcttcccataaaaactagacagaagcattctcagaaacttgtttgtgatgtgtgccctctactgacagagttgaacctttctttgcaaagagcagttttgaaacactctttttgtagaatctgcaagaggatatttggatagctttgaggatttcttgggaaacgggaatgtcttcagataaactctagacagaagcattctcagaaacttctttgggatgtttcaattgaagtcagtgttgaacattccctttcacagagcaggtttgaaacactctttttgtagtgtctataagtgaacatttggcgtgctttcaggcgtaacgtgaaaaaggaaatatcttcccataaaaactagacagaagcattctcagaaacttgttcgtgatgtgtgccctctactgacagagttgaacctttctttgcaaagagcagctttgaaacactctttttgtagaatctgcaagaggatatttggatagctttgaggatttcgttggaaacgggtatgtcttcagataaactctagacagaagcattctcagaaacttctttgggatgttgcattcaagtcacagagtagaacattcccattcatagagcagatttgaaacactctttttgtagtatctggaagtggacatttggagcgctttcaggcctatgttgagaaacgaaatatcttcccataaaaactagacggaagcattctcagaaacttacttgtgatgtgtttgctcaactaacagaattgaaccatcgttttgaaggagcagttttgaaacactgttttcgtagaatctgcaagtggatatttggctagctttgaggatttcgttggaaacgggattacatataaaaaggagacagcagcattctcagaaacttctttgtgatgtctgcattcaagtcacagagttgagcattccctttcatagagcaggttggaaacactctttttgtagtatctggatgaggacatttggagcgctttcaggcctatggtgaaaaaggaaatatcttcccgtaaaaactagacagaagcattctcagaaatttatttgtgatgtgtgccctcaactaacagagttgaacctttcttttgatagagcagttttgaaacactctttttgtaaaatctgcaagaggatatttggatagctttgaggatttcattgcaaacgggaatggcttcatataaactctagacagaagcattctcagaaacttcgttgggatgtttcgattgaagtcccagtgttgaacattcccttttatagcgcaggttggaaacactctttttgcattccctggaagtggacatttggagcgctttcaggacgacggtgaaaatggaaatatcttctaagaaaatctagatagaagcaatgtcagaaacttttatgtgatggatctactcagctaacagagttgaacctttcttttgagagagcagttttgcaacactctttttgtggaatatgcaagtggatattagggcagctttgaggatttcgttggaaacgggaatacatgtaaaaagcagacagcagcattctcagaaacttctttgtgatgtttgcattgaagtcacagagttgaacattccctttgagagagcaggtttgaaacacgccttttgtcatatctggaagtgtccattcggagcgcattcaggcttgtgttgaaaaaggaaatatcctcccataaaaactagacagaagcattctcagaaacttatctgtgatgtatgtactcaactaacagaactaaaccatcgttttgaaggagcagttttgaaacactctttttgcggaatctgcaagtggatatttggctagctgggaggatttcgttggaaacgggattacatacaaaaagcagacagcagcattctcagaaacttatttgtgatgtgtgccctcaactgacagtgttgaacctttgttttgatagagcagttctgaaacacactttttgtaaaatctgcaagaggatatttggatagctttgaggatttcgttggaaacgggaatgtcttcatgtaaactctacacagaagcattctcagaaactgctttgggatgtttcaattgaagtcccagtgttgaacattcccattcatagagcaggtttgaaacactctttttgtactatctggaagtggacatttggagcgctttcaggtcctacggtgaaaaaggagatatcttccaataaaaactagatagaagcaatgtcagaacttttttcatgatgtatctactcagcaaacagagttgaacctttcttttgagagagcagttttgaaacactctttttgtggaatatgcaagtgggtattaggccagcttggaggatttcgttggaaacgggaatacgtataaaaagcagacagcagcattgtcagaaactactttgtgatgtttgcattcaagtcacagaattgaacactccctttcacagagcaggtttgaaacactctttttgtagtgtctgtaagtgaacatatggattgctttcaggcctaaggtgaaaaaggaaatatcttcccataaaaactagacagaagcattctcagaaacttgtttgtgatgtgtgccctctactgacagagttgaacctttctttgcaaagagcagttttgaaacactctttttgtagaatctgcaagaggatatttggatagctttgaggatttcttgggaaacgggaatgtcttcagataaactctagacagaagcattctcagaaacttctttgggatgtttcaattgaagtcagtgttgaacattccctttcacagagcaggtttgaaacactctttttgtagtgtctataagtgaacatttggcgtgctttcaggcctaacgtgaaaaaggaaatatcttcccataaaaactagacagaagcattctcagaaacttgttcttgatgtgtcccctctactgacagagttgaacctttctttgcaaagagcagctttgaaacactctttttgtagaatctgcaagaggatatttggatagcttggaggatttcgttggaaacgggtatgtcttcagataaactctagacagaagcattctcagaaacttctttgggatgttgcattcaagtcacagagtagaacattcccattcatagagcagatttgaaacactctttttgtagtatctggaagtggacatttggagcgctttcaggcctatgttgaaaaaggaaatatcttcccataaaaactacacggaagcattctcagaaacttatttgtgatgtgtttgctcaactaacaggattgaaccatcgttttgaaggagcagttttgaaacactgttttcgtggaatctgcaagtggatatttggctagctttgaggatttctttggaaacgggattacatataaaaaggagacagcagcattctcagaaacttctttgtgatgtctgcattcaattcacagagttgagcattccctttcatagagcaggttggaaacactctttttgtagtatctggatgaggacatttggagcgctttcaggcgtatggtgaaaaaggaaatatcttcccgtaaaaactagacagaagaattctcagaagtttatttgtgatgtgtgccctcaactaacagagttgaacctttcttttgatagagcagttttgaaacactctttttgtaaaatctgcaagaggatatttggatagctttgaggatttcgttgcaaacgggaatggcttcatataaactctagacagaagcattctcagaaacttcgttgggatgtttcgattgaagtcccagtgttgaacattcccttttatagagcaggttggaaacactctttctgcattccctggaagtggacatttggagcgctttcaggacgacggtgaaaatggaaatatcttccaagaaaatctagatagaagcaatgtcagaaacttttatgtgatggatctactcagctaacagagttgaacctttcttttgagagagcagttttgcaacactctttttgtggaatatgcaagtggatattagggcagctttgaggatttcgttggaaacgggaatacatgtaaaaagcagacagcagcattctcagaaacttctttgtgatgtttgcattgaagtcacagagttgaacattccctttgagagagcaggtttgaaacacgccttttgtcatatctggaagtgtccattcggagcgcattcaggcttgtgttgaaaaaggaaatatcctcccataaaaactagacagaagcattctcagaaacttatctgtgatgtatgtactcaactaacagaactaaaccatcgttttgaaggagcagttttgaaacactctttttgcggaatctgcaagtggatatttggctagctgggaggatttcgttggaaacgggattacatacaaaaagcagacagcagcattctcagaaacttatttgtgatgtgtgccctcaactgacagtgttgaacctttgttttgatagagcagttctgaaacacactttttgtaaaatctgcaagaggatatttggatagctttgaggatttcgttggaaacgggaatgtcttcatgtaaactctagacagaagcattctcagaaactgctttgggatgtttcaattgaagtcccagtgttgaacattcccattcatagagcaggtttgaagcactctttttgtactatctggaagtggacatttggagcgctttcaggtctacggtgaaaaaggggatatcttccaataaaaactagatagaagcaatgtcagaacttttttcatgatgtatctactcagcaaacagagttgaacctttcttttgagagagcagttttgacacagtctttgtggaatatgtaattgggtattaggccagcttggaggatttcgttggaaacgggaatacgtataaaaagcagacagcagcattgtcagaaactactttgtgatgtttgcattcaagtcacagaattgaacactccctttcacagagcaggtttgaaacactctttttgtagtgtctgtaagtgaacatttggattgctttcaggcctaaggtgaaaaaggaaatatcttcccataaaaactagacagaagcattctcagaaacttgtttgtgatgtgtgccctctactgacagagttgaacctttctttgcaaagagcagttttgaaacactctttttgtagaatctgcaagaggatatttggatagctttgaagatttcttgggaaacgggaatgtcttcagataaactctagacagaagcattctcagaaacttctttgggatgtttcaattgaagtcacagtgttgaacattccctttcacagagcaggtttgaaacactctttttgtagtgtgtataagtgaacatttcacgtgctttcaggcctaacgtgaaaaaggaaatatcttcccataaaaactagacagaagcattctcagaaacttgttcatgatgtgtgccctctactgacagagttgaacctttctttgcaaagagcagctttgaaacactctttttgtagaatctgcaagaggatatttggatagctttgaggatttcgttggaaacgggtatgtcttcagataaactctagacagaagcattctcagaaacttctttgggatgttgcattcaagtcacagagtagaacattcccattcatagagcagatttgaaacactctttttgtagtatctggaagtggacatttggagcgctttcaggcctatgttgaaaaaggaaatatcttcccataaaaactagacggaagcattctcagaaacttatttgtgatgtgtttgctcaactaacaggattgaaccatcgttttgaaggagcagttttgaaacactgttttcgtggaatctgcaagtggatatttggctagctttgaggatttcgttggaaacgggattacatataaaaaggagacagccagcattctcagtaaacttctttgtgatgtctgcattcaattcacagcagttgagcattccctttcatagagcaggttggaaacactctttttgtagtatctggatgaggacatttggagcgctttcaggcgtatggtgaaaaaggaaatatcttcccgtaaaaactagacagaagcattctcagaaatttatttgtgatgtgtgccctcaactaacagagttgaacctttcttttgatagagcagttttgaaacactctttttgtaaaatctgcaagaggatatttggatagctttgaggatttcattgcaaacgggaatggcttcatataaactctagacagaagcattctcagaaacttcgttgggatgtttcgattgaagtcccagtgttgaacattcccttttatagagcaggttggaaacactctttctgcattccctggaagtggacatttggagcgctttcaggacgacggtgaaaatggaaatatcttccaagaaaatctagatagaagcaatgtcagaaacttttatgtgatggatctactcagctaacagagttgaacctttcttttgagagagcagttttgcaacactctttttgtggaatatgcaagtggatattagggcagctttgaggatttcgttggaaacgggaatacatgtaaaaagcagacagcagcattctcagaaacttctttgtgatgtttgcattgaagtcacagagttgaacattccctttgagagagcaggtttgaaacacgccttttgtcatatctggaagtgtccattcggagcgcattcaggcttgtgttgaaaaaggaaatatcctcccagaaaaactagacagaagcattctcagaaacttatctgtgatgtatgtactcaactaacagaactaaaccatcgttttgaaggagcagttttgaaacactctttttgcggaatctgcaagtggatatttggctagctgggaggatttcgttggaaacgggattacatacaaaaagcagacagcagcattctcagaaacttatttgtgatgtgtgccctcaactgacagtgttgaacctttgttttgatagagcagttctgaaacacactttttgtaaaatctgcaagaggatatttggatagctttgaggatttcgttggaaacgggaatgtcttcatgtaaactctagacagaagcattctcagaaactgctttgggatgtttcaattgaagtcccagtgttgaacattcccattcatagagcaggtttgaaacactctttttgtactatctggaagtggacatttggagcgctttcaggtctacggtgaaaaaggagatatcttccaataaaaactagatagaagcaatgtcagaacttttttcatgatgtatctactcagcaaacagagttgaacctttcttttgagagagcagttttgaaacactctttttgtggaatatgcaagtgggtattaggccagcttggaggatttcgttggaaacgggaatacgtataaaaagcagacagcagcattgtcagaaactactttgtgatgtttgcattcaagtcacagaattgaacactccctttcacagagcaggtttgaaacactctttttgtagtgtctgtaagtgaacatatggattgctttcaggcctaaggtgaaaaaggaaatatcttcccataaaaactagacagaagcattctcagaaacttgtttgtgatgtgtgccctctactgacagagttgaacctttctttgcaaagagcagttttgaaacactctttttgtagaatctgcaagaggatatttggatagctttgaggatttcttgggaaacgggaatgtcttcagataaactctagacagaagcattctcagaaacttctttgggatgtttcaattgaagtcacagtgttgaacattccctttcacagagcaggtttgaaacactctttttgtagtgtctataagtgaacatttggcgtgctttcaggcctaacgtgaaaaaggaaatatcttcccataaaaactagacagaagcattctcagaaacttgtttgtgatgtgtgccctctactgacagagttgaacctttctttgcaaagagcagctttgaaacactctttttgtagaatctgcaagaggatatttggatagctttgaggatttcgttggaaacgggtatgtcttcagataaactctagacacaagcattctcagaaacttcgttgggatgtttcgattgaagtcacagtgttgaacattcctttttatagagcaggtttgaaacactctttttgtagtatctggaagtggacatttggagcgctttcaggacgacggtgaaaatggaaatatcttccaataaaatctagatagaagcaatgtcagaaacttttatgtgatggatctactcagctaacagagttgaacctttcttttgagagagcagttttgcaacactctttttgtggaatatgcaagtggatattagggcagctttgaggatttcgttggaaacgggaatacatgtaaaaagcagacagcagcattctcagaaacttctttgtgatgtttgcattgaagtcacagagttgaacattccctttgagagagcaggtttgaaacacgccttttgtcatatctggaagtgtccattcggagcgcattcaggcttgtgttgaaaaaggaaatatcctcccataaaaactagacagaagcattctcagaaacttatctgtgatgtatgtactcaactaacagaactaaaccatcgttttgaaggagcagttttgaaacactctttttgcggaatctgcaagtggatatttggctagctgggaggatttcgttggaaacgggattacatacaaaaagcagacagcagcattctcagaaacttattggtgatgtgtgccctcaactgacagtgttgaacctttgttttgatagagcagttctgaaacacactttttgtaaaatctgcaagaggatatttggatagctttgaggatttcgttggaaacgggaatgtcttcatgtaaactctacacagaagcattctcagaaactgctttgggatgtttcaattgaagtcccagtgttgaacattccctttcataggagcaggtttgaaacactctttttgtactatctggaagtggacatttggagcgctttcaggtctacggtgaaaaaggagatatcttccaataaaaactagatagaagcaatgtcagaacttttttcatgatgtatctactcagcaaacagagttgaacctttcttttgagagagcagttttgaaacactctttttgtggaatatgcaagtgggtattaggccagcttggaggatttcgttggaaacgggaatacgtataaaaagcagacagcagcattgtcagaaactactttgtgatgtttgcattcaagtcacagaactgaacactccctttcacagagcaggtttgaaacactctttttgtagtgtctgtaagtgaacatttggattgctttcaggcctaaggtgaaaaaggaaatatcttcccataaaaactagacagaagcattctcagaaacttgtttgtgatgtgtgccctctactgacagagttgaacctttctttgcaaagagcagttttgaaacactctttttgtagaatctgcaagaggatatttggatagctttgaggatttcttgggaaacgggaatgtcttcagataaactctagacagaagcattctcagaaacttctttgggatgtttcaattgaagtcacagtgttgaacattccctttcacagagcaggtttgaaacactctttttgtagtgtctataagtgaacatttggcgtgctttcaggcgtaacgtgaaaaaggaaatatcttcccataaaaaccagacagaagcattctcagaaacttgttcgtgatgtgtgccctctactgacagagttgaacctttctttgcaaagagcagctttgaaacacacatttgtagaatctgcaagaggatatttggatagcttggaggatttcgttggaaacgggtatgtcttcagataaactctagacagaagcattctcagaaacttctttgggatgttgcattcaagtcacagagtagaacattcccattcatagagcagatttgaaacactctttttgtagtatctggaagtggacatttggagcgctttcaggcctatgttgaaaaaggaaatatcttcccataaaaactagacggaagcattctcagaaacttatttgtgatgtgtttgctcaactaacaggattgaaccatcgttttgaaggagcagttttgaaacactgttttcgtggaatctgcaagtggatatttggctagctttgaggatttcgttggaaacgggattacatataaaaaggagacagcagcattctcagaaacttctttgtgatgtctgcattcaagtcacagagttgagcattccctttcatagagcaggttggaaacactctttttgtagtatctggatgaggacatttggagcgctttcaggcgtatggtgaaaaaggaaatatcttcccgtaaaaactagacagaagcattctcagaaatttatttgtgatgtgtgccctcaactaacagagttgaacctttcttttgatagagcagttttgaaacactctttttgtaaaatctgcaagaggatatttggatagctttgaggatttcgttgcaaacgggaatggcttcatataaactctagacagaagcattctcagaaacctcgttgggatgtttcgattgaagtcccagtgttgaacattcccttttatagagcaggttggaaacactctttctgcattccctggaagtggacatttggagcgctttcaggacgacggtgaaaatggaaatatcttccaagaaaatctagatagaagcaatgtcagaaacttttctgtgatggatctactcagctaacagagttgaacctttcttttgagagagcagttttgcaacactctttttgtggaatatgcaagtggatattagggcagctttgaggatttcgttggaaacgggaatacatgtaaaaagcagacagcagcattctcagaaacttctttgtgatgtttgcattgaagtcacagagttgaacattccctttgagagagcaggtttgaaacacgccttttgtcatatctggaagtgtccattcggagcgcattcaggcttgtgttgaaaaaggaaatatcctcccataaaaactagacagaagcattctcagaaacttatctgtgatgtatgtactcaactaacagaactaaaccatcgttttgaaggagcagttttgaaacactctttttgcggaatctgcaagtggatatttggctagctgggaggatttcgttggaaacgggattacatacaaaaagcagacagcagcattctcagaaacttatttgtgatgtgtgccctcaactgacagtgttgaacctttgttttgatagagcagttctgaaacacactttttgtaaaatctgcaagaggatatttggatagctttgaggatttcgttggaaacgggaatgtcttcatgtaaactctagacagaagcattctcagaaactgctttgggatgtttcaattgaagtcccagtgttgaacattccctttcatagagcaggtttgaaacactctttttgtactatctggaagtggacatttggagcgctttcaggtctacggtgaaaaaggagatatcttccaataaaaactagatagaagcaatgtcagaacttttttcatgatgtatctactcagctaacagagttgaacctttcttttgagagagcagttttgaaacactctttttgtggaatatgcaagtgggtattaggccagcttggaggatttcgttggaaacgggaatacgtataaaaagcagacagcagcattgtcagaaactactttgtgatgtttgcatgcaagtcacagaatggaacactgcctttcacagagcaggtttgaaacactctttttgtagtgtctgtaagtgaacatttggattgctttcaggcctaaggtgaaaaaggaaatatcttcccataaaaactagacagaagcattctcagaaacttgtttgtgatgtgtgccctctactgacagagttgaacctttctttgcaaagagcagttttgaaacactctttttgtagaatctgcaagaggatatttggatagctttgaggatttcttgggaaacgggaatgtcttcagataaactctagacagaagcattctcagaaacttctttgggatgtttcaattgaagtcacagtgttgaacattccctttcacagagcaggtttgaaacactctttttgtagtgtctataagtgaacatttggcgtgctttcaggcctaacgtgaaaaaggaaatatcttcccataaaaactagacagaagcattctcagaaacttgttcttgatgtgtcccctctactgacagagttgaacctttctttgcaaagagcagctttgaaacactctttttgtagaatctgcaagaggatatttggatagcttggaggatttcgttagaaacgggtatgtcttcagataaactctagacagaagcattctcagaaacttctttgggatgttgcattcaagtcacagagtagaacattcccattcatagagcagatttgaaacactctttttgtagtatctggaagtggacatttggagcgctttcaggcctatgttgaaaaaggaaatatcttcccataaaaactagacggaagcattctcagaaacttatttgtgatgtgtttgctcaactaacaggattgaaccatcgttttgaaggagcagttttgaaacactgttttcgtggaatctgcaagtggatatttggctagctttgaggatttcgttggaaacgggattacatataaaaaggagacagcagcattctcagaaacttctttgtgatgtttgcattcaagtcacagagttgaacattccctttcatagagcaggtttgaaacactctttttgtagtatctggatgtggacatttggatcgctttcaggcctatggtgaaaaaggaaatatcttcccatgaaaactagacagaagcattctcagaaacttatttgtgatgtgtgccctcaactgacagtgttgaacctttgttttgatagagcagttctgaaacacactttttgtaaaatctgcaagaggatatttggatagctttgaggatttcattggaaacgggaatgtcttcatgtaaactctagacagaagcattctcagaaactgctttgggatgtttcaattgaagtcccagtgttgaacattccctttcatagagcaggtttgaaacactctttttgtactatctggaagtggacatttggagcgctttcaggtctacggtgaaaaaggagatatcttccaataaaaactagatagaagcaatgtcagaacttttttcatgatgtatctactcagcaaacagagttgaacctttcttttgggagagcagttttgaaacactctttttgtggaatatgcaagtgggtattaggccagcttggaggatttcgttggaaacgggaatacgtataaaaagcagtcagcagcattgtcagaaactactttgtgatgtttgcattcaagtcacagaattgaacactccctttcacagagcaggtttgaaacactctttttgtagtgtctgtaagtgaacatttggattgctttcaggcctaaggtgaaaaaggaaatatcttcccataaaaactagacagaagcattctcagaaacttgtttgtgatgtgtgccctctactgtcagagttgaacctttctttgcaaagagcagttttgaaacactctttttgtagaatctgcaagaggatatttggatagctttgaagatttcttgggaaacgggaatgtcttcagataaactctagacagaagcattctcagaaacttctttgggatgtttcaattgaagtcacagtgttgaacattccctttcacagagcaggtttgaaacactctttttgtagtgtctataagtgaacatttggcgtgctttcaggcctaacgtgaaaaaggaaatatcttcccataaaaactagacagaagcattctcagaaacttgttcatgatgtgtgccctctactgacagagttgaacctttctttgcaaagagcagctttgaaacactctttttgtagaatctgcaagaggatatttggatagctttgaggatttcgttggaaacgggtatgtcttcagataaactctagacagaagcattctcagaaacttctttgggatgttgcattcaagtcacagagtagaacattcccattcatagagcagatttgaaacactctttttgtagtatctggaagtggacatttggagcgctttcaggcctatgttgaaaaaggaaatatcttcccataaaaactagacggaagcattctcagaaacttatttgtgatgtgtttgctcaactaacaggattgaaccatcgttttgaaggagcagttttgaaacactgttttcgtggaatctgcaagtggatatttggctagctttgaggatttcgttggaaacgggattacatataaaaaggagacagcagcattctcagaaacttctttgtgatgtttgcattcaagtcacagagttgaacattccctttcatagagcaggtttgaaacactctttttgtagtatctggatgtggacatttggatcgctttcaggcctatggtgaaaaaggaaatatcttcccatgaaaactagacagaagcattctcagaaacttatttgtgatgtgtgccctcaactgacagtgtggaacctttgttttgatagagcagttctgaaacacactttttgtaaaatctgcaagaggatatttggatagctttgaggatttcgttggaaacgggaatgtcttcatgtaaactctagacagaagcattctcagaaactgctttgggatgtttcaattgaagtcccagtgttgaacattccctttcatagagcaggtttgaaacactctttttgtactatctggaagtggacatttggagcgctttcaggtctacggtgaaaaaggagatatcttccaataaaaactagatagaagcaatgtcagaacttttttcatgatgtatctactcagcaaacagagttgaacctttcttttgagagagcagttttgaaacactctttttgtggaatatgcaagtgggtattaggccagcttggaggatttcgttggaaacgggaatacgtataaaaagcagacagcagcattgtcagaaactactttgtgatgtttgcattcaagtcacagaattgaacactccctttcacagagcaggtttgaaacactctttttgtagtgtctgtaagtgaacatatggattgctttcaggcctaaggtgaaaaaggaaatatcttcccataaaaactaaactagacagaagcattctcagaaacttgtttgtgatgtgtgccctctactgacagagttgaacctttctttgcaaagagcagctttgaaacactctttttgtagaatctgcaagaggatatgtggatagctttgaggatttcgttggaaacgggaatgtcttcagataaactctagacagaagcattctcagaaacttctttgggatgtttcaattgaagtcacagtgttgaacattccctttcacagagcaggtttgaaacactctttttgtagtgtctataagtgaacatttggcgtgctttcaggcctaacgtgaaaaaggaaatatcttcccataaaaactagacagaagcattctcagaaacttgttcatgatgtgtgccctctactgacagagttgaacctttctttgcaaagagcagctttgaaacactctttttgtagaatctgcaagaggatatttggatagctttgaggatttcgttggaaacgggtatgtcttcagataaactctagacagaagcattctcagaaacttctttgggatgttgcattcaagtcacagagtagaacattcccattcatagagcagatttgaaacactctttttgtagtatctggaagtggacatttggagcgctttcaggcctatgttgaaaaaggaaatatcttcccataaaaactagacggaagcattctcagaaacttacttgtgatgtgtttgctcaactaacagaattgaaccatcgttttgaaggagcagttttgaaacactgttttcgtggaatctgcaagtggatatttggctagctttgaggatttcgttggaaacgggattacatataaaaaggagacagcagcattctcagaaacttctttgtgatgtttgcattcaagtcacagagttgaacattccctttcatagagcaggtttgaaacactctttttgtagtatctggatgtggacatttggatcgctttcaggcctatggtgaaaaaggaaatatcttcccatgaaaactagacagaagcattctcagaaacttatttgtgatgtgtgccctcaactgacagtgttgaacctttgttttgatagagcagttctgaaacacactttttgtaaaatctgcaagaggatatttggatagctctgaggatttcgttggaaacgggaatgtcttcatgtaaactctagacagaagcattctcagaaactgctttgggatgtttcaattgaagtcccagtgttgaacattcccattcatagagcaggtttgaaacactctttttgtactatctggaagtggacatttggagcgctttcaggtctacggtgaaaaaggagatatcttccaataaaaactagatagaagcaatgtcagaacttttttcatgatgtatctactcagcaaacagagttgaacctttcttttgagagagcagttttgaaacactctttttgtggaatatgcaagtgggtattaggccagcttggaggatttcgttggaaacgggaatacgtataaaaagcagacagcagcattgtcagaaactactttgtgatgtttgcattcaagtcacagaattgaacactccctttcacagagcaggtttgaaaacactctttttgtagtgtctgtaagtgaacatatggattgctttcaggcctaaggtgaaaaaggaaatatcttcccataaaaactagacagaagcattctcagaaacttgtttgtgatatgtgccctctactgacagagttgagcctttctttgcaaagagcagttttgaaacactctttttgtagaatctgcaagaggatatttggatagctttgaggatttcttgggaaacgggaatgtcttcagataaactctagacagaagcattctcagaaacttctttgggatgtttcaattgaagtcacagtgttgaacattccctttcacagagtaggtttgaaacactctttttgtagtgtctataagtgaacatttggcgtgctttcaggcctaacgtgaaaaaggaaatatcttcccataaaaactagacagaagcattctcagaaacttgttcgtgatgtgtgccctctactgacagagttgaacctttctttgcaaagagcagctttgaaacactctttttgtagaatctgcaagaggatatttggatagctttgaggatttcgttggaaacgggtatgtcttcagataaactctagacagaagcattctcagaaacttctttgggatgttgcattcaagtcacagagtagaacattcccattcatagagcagatttgaaacactctttttgtagtatctggaagtggacatttggagcgctttcaggcctatgttgaaaaaggaaatatcttcccataaaaactagacggaagcattctcagaaacttatttgtgatgtgtttgctcaactaacaggattgaaccatcgttttgaaggagcagttttgaaacactgttttcgtggaatctgcaagtggatatttggctagctttgaggatttcgttggaaacgggattacatatacaaaggagacagcagcattctcagaaacttctttgtgatgtctgcattcaattcacagagttgagcattccctttcatagagcaggttggaaacactctttttgtagtatctggatgaggacatttggagcgctttcaggcgtatggtgaaaaaggaaatatcttcccgtaaaaactagacagaagcattctcagaagtttatttgtgatgtgtgccctcaactaacagagttgaacctttcttttgatagagcagttttgaaacactctttttgtaaaatctgcaagaggatatttggatagctttgaggatttcgttgcaaacgggaatggcttcatataaactagacagaagcattctcagaaacttcgttgggatgtttcgattgaagtcccagtgttgaacattcccttttatagagcaggttggaaacactctttctgcattccctggaagtggacatttggagcgctttcaggacgacggtgaaaatggaaatatcttccaagaaaatctagatagaagcaacgtcagaaacttttctgtgatggatctactcagctaacagagttgaacctttcttttgagagagcagttttgcaacactctttttgtggaatatgcaagtggatattagggcagctttgaggatttcgttggaaacgggaatacatgtaaaaagcagacagcagcattctcagaaacttctttgtgatgtttgcattgaagtcacagagttgaacattccctttgagagagcaggtttgaaacacgccttttgtcatatctggaagtgtccattcggagcgcattcaggcttgtgttgaaaaaggaaatatcctcccataaaaactagacagaagcattctcagaaacttatctgtgatgtatgtactcaactaacagaactaaaccatcgttttgaaggagcagttttgaaacactctttttgcggaatctgcaagtggatatttggctagctgggaggatttcgttggaaacgggattacatacaaaaagcagacagcagcattctcagaaacttatttgtgatgtgtgccctcaactgacagtgttgaacctttgttttgatagagcagttctgaaacacactttttgtaaaatctgcaagaggatatttggatagctttgaggatttcgttggaaacgggaatgtcttcatgtaaactctagacagaagcattctcagaaactgctttgggatgtttcaattgaagtcccagtgttgaacattcccattcatagagcaggtttgaaacactctttttgtactatctggaagtggacatttggagcgctttcaggtctacggtgaaaaaggagatatcttccaataaaaactagatagaagcaatgtcagaacttttttcatgatgtatctactcagcaaacagagttgaacctttcttttgagggagcagttttgaaacactatttttgtggaatatgcaagtgggtattaggccagcttggaggatttcgttggaaacgggaatacgtataaaaagcagacagcagcattgtcagaaactactttgtgatatttgcattcaagtcacagaattgaacactccctttcacagagcaggtttgaaacactctttttgtagtgtctgtaagtgaacatttggattgctttcaggcctaaggtgaaaaaggaaatatcttcccataaaaactagacagaagcattctcagaaacttgtttgtgatgtgtgccctctactgacagagttgaacctttctttgcaaagagcagttttgaaacactctttttgtagaatctgcaagaggatatttggatagctttgaggatttcttgggaaacgggaatgtcttcagataaactctagacagaagcattctcagaaacttctttgggatgtttcaattgaagtcacagtgttgaacattccctttcacagagcaggtttgaaacactctttttgtagtgtctataattgaacatttggcgtgctttcaggcctaacgtgaaaaaggaaatatcttcccataaaaactagacagaagcattctcagaaacttgttcgtgatgtgtgccctctactgacagagttgaacctttctttgcaaagagcagctttgaaacactctttttgtagaatctgcaagaggatatgtggatagctttgaggatttcgttggaaacgggtatgtcttcacataaactctagacggaagcatactcagaaacttctttgggacgtttcaattgaagtcacagtgttgaacattccctttcacagagcaggtttgaaacactctttttgtagtgtctataagtgaacatttggcgtgctttcaggcctaacgtgaaaaaggaaatatcttcccataaaaactagacagaagcattctcagaaacttgttcatgatgtgtgccctctactgacagagttgaacctttctttgcaaagagcagctttgaaacactctttttgtagaatctgcaagaggatatttggatagctttgaggatttcgttggaaacgggtatgtcttcagataaactctagacagaagcattctcagaaacttctttgggatgttgcattcaagtcacagagtagaacattcccattcatagagcagatttgaaacactctttttgtagtatctggaagtggacatttggagcgctttcaggcctatgttgaaaaaggaaatatcttcccataaaaactagacggaagcattctcagaaacttacttgtgatgtgtttgctcaactaacagaattgaaccatcgttttgaaggagcagttttgaaacactgttttcgtggaatctgcaagtggatatttggctagctttgaggatttcgttggaaacgggattacatataaaaaggagacagcagcattctcagaaacttctttgtgatgtttgcattcaagtcacagagttgaacattccctttcatagagcaggtttgaaacactctttttgtagtatctggatgtggacatttggatcgctttcaggcctatggtgaaaaaggaaatatcttcccatgaaaactagacagaagcattctcagaaacttatttgtgatgtgtgccctcaactgacagtgttgaacctttgttttgatagagcagttctgaaacacactttttgtaaaatctgcaagaggatatttggatagatttgaggatttcgttggaaacgggaatgtcttcatgtaaactctacacagaagcattctcagaaactgctttgggatgtttcaattgaagtcccagtgttgaacattccctttcatagagcaggtttgaaacactctttttgtactatctggaagtggacatttggagcgctttcaggtctacggtgaaaaaggagatatcttccaataaaaactagatagaagcaatgtcagaacttttttcatgatgtatctactcagcaaacagagttgaacctttcttttgagagagcagttttgaaacactctttttgtggaatatgcaagtgggtattaggccagcttggaggatttcgttggaaacgggaataagtataaaaagcagacagcagcattgtcagaaactactttgtgatatttgcattcaagtcacagaattgaacactccctttcacagagcaggtttgaaacactctttttgtagtgtctgtaagtgaacatatggattgctttcaggcctaaggtgaaaaaggaaatatcttcccataaaaactagacagaagcattctcagaaacttgtttgtgatgtgtgccctctactgtcagagttgaacctttctttgcaaagagcagttttgaaacactctttttgtagaatctgcaagaggatatttggatagctttgaagatttcttgggaaacgggaatgtcttcagataaactctagacagaagcattctcagaaacttctttgggatgtttcaattgaagtcacagtgttgaacattccctttcacagagcaggtttgaaacactctttttgtagtgtctataagtgaacatttggcgtgctttcaggcctaacgtgaaaaaggaaatatcttcccataaaaactagacagaagcattctcagaaacttgtttgtgatgtgtgccctctactgacagagttgaacctttctttgcaaagagcagctttgaaacactctttttgtagaatctgcaagaggatatttggatagctttgaggatttcgttggaaacgggtatgtcttcagataaactctagacagaagcattctcagaaacttctttgggatgttgcattcaagtcacagagtagaacattcccattcatagagcagatttgaaacactctttttgtagtatctggaagtggacatttggagcgctttcaggcctatgttgaaaaaggaaatatcttcccataaaaactagacggaagcattctcagaaacttatttgtgatgtgtttgctcaactaacaggattgaaccatcgttttgaaggagcagttttgaaacactgttttcgtggaatctgcaagtggatatttggctagctttgaggatttcgttggaaacgggattacatataaaaaggagacagcagcattctcagaaacttctttgtgatgtctgcattcaattcacagagttgagcattccctttcatagagcaggttggaaacactctttttgtagtatctggatgaggacatttggagcgctttcaggcgtatggtgaaaaaggaaatatcttcccgtaaaaactagacagaagcattctcagaaatttatttgtgatgtgtgccctcaactaacagagttgaacctttcttttgatagagcagttttgaaacactctttttgtaaaatctgcaagaggatatttggatagctttgaggatttcattgcaaacgggaatggcttcatataaactctagacagaagcattctcagaaacttcgttgggatgtttcgattgaagtcccagtgttgaacattcccttttatagagcaggttggaaacactctttctgcattccctggaagtggacatttggagcgctttcaggacgacggtgaaaatggaaatatcttccaagaaaatctagatagaagcaacgtcagaaacttttctgtgatggatctactcagctaacagagttgaacctttcttttgagagagcagttttgcaacactctttttgtggaatatgcaagtggatattagggcagctttgaggatttcgttggaaacgggaatacatgtaaaaagcagacagcagcattctcagaaacttctttgtgatgtttgcattgaagtcacagagttgaacattccctttgagagagcaggtttgaaacacgccttttgtcatatctggaagtgtccattcggagcgcattcaggcttgtgttgaaaaaggaaatatcctcccataaaaactagacagaagcattctcagaaacttatctgtgatgtatgtactcaactaacagaactaaaccatcgttttgaaggagcagttttgaaacactctttttgcggaatctgcaagtggatatttggctagctgggaggatttcgttggaaacgggattacatacaaaaagcagacagcagcattctcagaaacttatttgtgatgtgtgcactcaactgacagtgttgaacctttgttttgatagagcagttctgaaacacactttttgtaaaatctgcaagaggatatttggatagctttgaggatttcgttggaaacgggaatgtcttcatgtaaactctagacagaagcattctcagaaactgctttgggatgtttcaattgaagtcccagtgttgaacattccctttcatagagcaggtttgaaacactctttttgtactatctggaagtggacatttggagcgctttcaggtctacggtgaaaaaggagatatcttccaataaaaactagatagaagcaatgtcagaacttttttcatgatgtatctactcagcaaacagagttgaacctttcttttgagagagcagttttgaaacactctttttgtggaatatgcaagtgggtattaggccagcttggaggatttcgttggaaacgggaatacgtataaaaagcagacagcagcattgtcagaaactactttgtgatgtttgcattcaagtcacagaattgaacactccctttcacagagcaggtttgaaacactctttttgtagtgtctgtaagtgaacatatggattgctttcaggcctaaggtgaaaaaggaaatatcttcccataaaaactagacagaagcattctcagaaacttgtttgtgatgtgtgccctctactgacagagttgaacctttctttgcaaagagcagttttgaaacactctttttgtagaatctgcaagaggatatttggatagctttgaggatttcttgggaaacgggaatgtcttcagataaactctagacagaagcattctcagaaacttctttgggatgtttcaattgaagtcacagtgttgaacattccctttcacagagcaggtttgaaacactctttttgtagtgtctataagtgaacatttggcgtgctttcaggcctaacgtgaaaaaggaaatatcttcccataaaaactagacagaagcattctcagaaacttgttcgtgatgtgtgccctctactgacagagttgaacctttctttgcaaagagcagctttgaaacactctttttgtagaatctgcaagaggatatttggatagctttgaggatttcgttggaaacgggtatgtcttcagataaactctagacagaagcattctcagaaacttctttgggatgttgcattcaagtcacagagtagaacattcccattcatagagcagatttgaaacactctttttgtagtatctggaagtggacatttggagcgctttcaggcctatgttgaaaaaggaaatatcttcccataaaaactagacggaagcattctcagaaacttacttgtgatgtgtttgctcaactaacagaattgaaccatcgttttgaaggagcagttttgaaacactgttttcgtggaatctgcaagtggatatttggctagctttgaggatttcgttggaaacgggattacatataaaaaggagacagcagcattctcagaaacttctttgtgatgtttgcattcaagtcacagagttgaacattccctttcatagagcaggtttgaaacactctttttgtagtatctggatgtggacatttggatcgctttcaggcctatggtgaaaaaggaaatatcttcccatgaaaactagacagaagattctcagaaatttatttgtgatgtgtgccctcaactaacagagttgaacctttcttttgatagagcagttttgaaacactctttttgtaaaatctgcaagaggatatttggatagctttgaggatttcgttgcaaacgggaatggcttcatataaactctagacagaagcattctcagaaacttcgttgggatgtttcgattgaagtcccagtgttgaacattcccttttatagagcaggttggaaacactctttctgcattccctggaagtggacatttggagcgctttcaggacgacggtgaaaatggaaatatcttccaagaaaatctagatagaagcaacgtcagaaacttttatgtgatggatctactcagctaacagagttgaacctttcttttgagagagcagttttgcaacactctttttgtggaatatgcaagtggatattagggcagctttgaggatttcgttggaaacgggaatacatgtaaaaagcagacagcagcattctcagaaacttctttgtgatgtttgcattgaagtcacagagttgaacattccctttgagagagcaggtttgaaacacgccttttgtcatatctggaagtgtccattcggagcgcattcaggcttgtgttgaaaaaggaaatatcctcccataaaaactagacagatatgtggagagagagggagagatttcttctaaaaaattggcttacacgccaggcgtggtggctcacgcctgtaatcccagcactttgggaggctgtgaaacactctttttgtggtatctggatgtggacatttggatcgctttgggcctatggtgaaaaaggaaatatcttcccatgaaaactagacagaagnnnnnnnnnnnnnnnnnnnnnnnnnnnnnnnnnnnnnnnnnnnnnnnnnnnnnnnnnnnnnnnnnnnnnnnnnnnnnnnnnnnnnnnnnnnnnnnnnnnnagcattctcagaaacttatttgtgatgtgtgccctcaactgacagtgttgaacctttgttttgatagagcagttctgaaacacactttttgtaaaatctgcaagaggatatttggatagctttgaggatttcgttggaaacgggaatgtcttcatgtaaactctagacagaagcattctcagaaactgctttgggatgtttcaattgaagtcccagtgttgaacattcccattcatagagcaggtttgaaacactctttttgtactatctggaagtggacatttggagcgctttcaggtctacggtgaaaaaggagatatcttccaataaaaactagatagaagcaatgtcagaaacttttttatgatgtatctactcagctaacagagttgaacctttcttttgagagagcagtattgaaacactctttttgtggaatatgcaagtggatattagggcagcttggaggattttgttggaaacgggaatacatattaaaagcagacagcagcattctcagaatcttctctgtgatgtttgcattcaagtcacagagttgaacattccctttcacagagcatgtttgaaacactctttatccattatctggaagtggacatttgtagcgttttcaggcctatggtgaaaaaggcaataccttcccataaaaactagacagaagcattctcagaaacttgtttgtgatgtgtgtactcaactgacagagttgaacctttcttttgatagagcagttttgaaacactctttttgtagaatctgcaagtggatatttggatagctttgaggatttcgttggaaacgggaatatcttcatataaaatctagacagaagcattctcagaaacttctttgtgatgtttccattcaagtcacagagttgaacattccctttcatagagcaggtttgaaacactctttttgtagtatctggatgtggacatttggatcggctttcaggcctatggtgaaaaaggaaatatcttcccatgaaaactagacagaagcattctcagaaatttatttgtgatgtgtgccctcaactaacagagttgaacctttcttttgatagagcagttttgaaacactctttttgtaaaatctgcaagaggatatttggatagctttgaggatttcgttgcaaacgggaatggcttcatataaactctagacagaagcattctcagaaacttcgttgggatgtttcgattgaagtcccagtgttgaacattcccttctatagagcaggttggaaacactctttttgcattccctggaagtgcacatttggagcgctttcaggacgacggtgacaatggaaatatcttccaataaaatctagatagaagcaatgtcagaaacttttctgtgatggatctactcagctaacagagttgaaactttcttttgagagagcagttttgcaacactctttttgtggaatatgcaagtggatattagggcagctttgaggatttcgttggaaacgggaatacatgtaaaaagcagacagcagcattctcagaaacttctttgtgatgtttgcattgaagtcacagagttgaacattccctttgagagagcaggtttgaaacacgccttttgtcatatctggaagtgtccattcggagcgcattcaggcttgtgttgaaaaaggaaatatcctcccagaaaaactagacagaagcattctcagaaacttatctgtgatgtatgtactcaactaacagaactaaaccatcgttttgaagggcagttttgaaacactctttttgcggaatctgcaagtggatatttggctagctgggaggatttcgttggaaacgggattacatacaaaaagcagacagcagcattctcagaaacttatttgtgatgtgtgccctcaactgacagtgttgaacctttgttttgatagagcagttctgaaacacactttttgtaaaatctgcaagaggatatttggatagctttgaggatttcgttggaaacgggaatgtcttcatgtaaactctagacagaagcattctcagaaactgctttgggatgtttcaattgaagtcccagtgttgaacattccctttcatagagcaggtttgaaacactctttttgtactatctggaagtggacatttggagcgctttcaggtctacggtgaaaaaggagatatcttccaataaaaactagatagaagcaatgtcagaacttttttcatgatgtatctactcagcaaacagagttgaacctttcttttgagagagcagttttgaaacactctttttgtggaatatgcaagtgggtattaggccagcttggaggatttcgttggaaacgggaatacgtataaaaagcagacagcagcattgtcagaaactactttgtgatgtttgcattcaagtcacagaattgaacactccctttcacagagcaggtttgaaacactctttttgtagtgtctataagtgaacatttggcgtgctttcaggcctaaggtgaaaaaggaaatatcttcccataaaaactagacagaagcattctcagaaacttgtttgtgatgtgtgccctctactgacagagttgaacctttctttgcaaagagcagttttgaaacactctttttgtagaatctgcaagaggatatttggatagctttgaggatttcttgggaaacgggaatgtcttcagataaactctagacagaagcattctcagaaacttctttgggatgtttcaattgaagtcacagtgttgaacattccctttcacagagcaggtttgaaacactctttttgtagtgtctataagtgaacatttggcgtgctttcaggcctaacgtgaaaaaggaaatatcttcccataaaaactagacagaagcattctcagaaacttgttcgtgatgtgtgccctctactgacagagttgaacctttctttgcaaagagcagctttgaaacacactttttgtagaatctgcaagaggatatttggatagctttgaggatttcgttggaaacgggtatgtcttcagataaactctagacagaagcattctcagaaacttctttgggatgttgcattcaagtcacagagtagaacattcccattcatagagcagatttgaaacactctttttgtagtatctggaaatggacatttggagcgctttcaggcctatgttgaaaaaggaaatatcttcccataaaaactagacggaagcattctcagaatcttatttgtgatgtgtttgctcaactaacaggattgaaccatcgttttgaaggagcagttttgaaacactgttttcgtggaatctgcaagtggatatttggctagctttgaggatttcgttggaaacgggattacatataaaaaggagacagcagcattctcagaaacttctttgtgatgtctgcattcaattcacagagttgagcattccctttcatagagcaggttggaaacactctttttgtagtatctggatgaggacatttggagcgctttcaggcgtatggtgaaaaaggaaatatcttcccgtaaaaactagacagaagcattctcagaagtttatttgtgatgtgtgccctcaactaacagagttgaacctttcttttgatagagcagttttgaaacactctttttgtaaaatctgcaaggggatatttggatagctttgaggatttcgttgcaaacgggaatggcttcatataaactctagacagaaagcattctcagaaacttcgtcgggatgtttcgattgaagtcccagtgttgaacattcccttttatagagcaggttggaaacactctttctgcattccctggaagtggacaattggagcgctttcaggacgacggtgaaaatggaaatatcttccaataaaatctggatagagcaatgtcagaaacttttctgtgatggatctactcagctaacagagttgaacctttcttttgagagagcagttttgcaacactctttttgtggaatatgcaagtggatattagggcagctttgaggatttcgttggaaacgggaatacatgtaaaaagcagacagcagcattctcagaaacttctttgtgatgtttgcattgaagtcacagagttgaacattccctttgagagagcaggtttgaaacacgccttttgtcatatctggaagtgtccattcggagcgcattcaggcttgtgttgaaaaaggaaatatcctcccataaaaactagacagaagcattctcagaaacttatctgtgatgtatgtactcaactaacagaactaaaccatcgttttgaaggagcagttttgaaacactctttttgcggaatctgcaagtggatatttggctagctgggaggatttcgttggaaacgggattacatacaaaaagcagacagcagcattctcagaaacttatttgtgatgtgtgccctcaactgacagtgttgaacctttgttttgatagagcagttctgaaacacactttttgtaaaatctgcaagaggatatttggatagctttgaggatttcgttggaaacgggaatgtcttcatgtaaactctacacagaagcattctcagaaactgctttgggatgtttcaattgaagtcccagtgttgaacattccctttcatagagcaggtttgaaaccctctttttgtactatctggaagtggacatttggagcgctttcaggtctacggtgaaaaaggagatatcttccaataaaaactagatagaagcaatgtcagaacttttttcatgatgtatctactcagcaaacagagttgaacctttcttttgagagagcagttttgaaacactctttttgtggaatatgcaagtgggtattaggccagcttggaggatttcgttggaaacgggaatacgtataaaaagcagacagcagcattttcagagactactttgtgatgtttgcaatcaagtcacagaattgaacactccctttcacagagcaggtttgaaacactctttttgtagtgtctgtaagtgaacatttggattgctttcaggcctaaggtgaaaaaggaaatatcttcccataaaaactagacagaagcattctcagcaaacttgtttgtgatgtgtgccctctactgacagagttgaacctttctttgcaaagagcagttttgaaacagtctttttgtagaatctgcaagaggatatttggatagctttgaggatttcttgggaaacgggaatgtcttcagataaactctagacagaagcattctcagaaacttctttgggatgtttcaattgaagtcacagtgttgaacattccctttcacagagcaggtttgaaacactctttttgtagtgtctataagtgaacatttggcgtgctttcaggcctaacgtgaaaaaggaaatatcttcccataaaaactagacagaagcattctcagaaacttgttcgtgatgtgtgccctctactgacagagttgaacctttctttgcaaagagcagctttgaaacactctttctgtagaatctgcaagaggatatttggatagatttgaggatttcgttggaaacgggtatgtcttcagataaactctagacagaagcattctcagaaacttctttgggatgttgcattcaagtcacagagtagaacattcccattcatagagcagatttgaaacactctttttgtagtatctggaagtggacatttggagcgctttcaggcctatgttgaaaaaggaaatatcttcccataaaaactagacggaagcgttctcagaaacttatttgtgatgtgtttgctcaactaacaggattgaaccatcgtttggaaggagcagttttgaaacactgttttcgtggaatctgcaagtggatatttggctagctttgaggatttcgttggaaacgggattacatataaaaaggagacagcagcattctcagaaacttctttgtgatgtctgcattcaagtcacagagttgagcattccctttcatagagcaggttggaaacactctttttgtagtatctggatgaggacatttggagcgctttcaggcgtatggtgaaaaaggaaatatcttcccgtaaaaactagacagaagcattctcagaaatttatttgtgatgtgtgccctcacctaacagagttgaacctttcttttgatagagcagttttgaaacactctttttgtaaaatctgcaagaggatatttggatagctttgaggatttcgttgcaaacgggaatggcttcatataaactctagacagaagcattctcagaaacttcgttgggatgtttcgattgaagtcccagtgttgaacattcccttttatagagcaggttggaaacactctttctgcattccctggaagtggacatttggagcgctttcaggacgacggtgaaaatggaaatatcttccaagaaaatctagatagaagcaatgtcagaaacttttatgtgatggatctactcagctaacagagttgaacctttcttttgagagagcagttttgcaacactctttttgtggaatatgcaagtggatattagggcagctttgaggatttcgttggaaacgggaatacatgtaaaaagcagacagcagcattctcagaaacttctttgtgatgtttgcattgaagtcacagagttgaacattccctttgagagagcaggtttgaaacacgccttttgtcatatctggaagtgtccattcggagcgcattcaggcttgtgttgaaaaaggaaatatcctcccataaaaactagacagaagcattctcagaaacttatctgtgatgtatgtactcaactaacagaactaaaccatcgttttgaaggagcagttttgaaacactctttttgcggaatctgcaagtggatatttggctagctgggaggatttcgttggaaacgggattacatacaaaaagcagacagcagcattctcagaaacttatttgtgatgtgtgccctcaactgacagtgttgaacctttgttttgatagagcagttctgaaacacactttttgtaaaatctgcaagaggatatttggatagctttgaggatttcgttggaaacgggaatgtcttcatgtaaactctagacagaagcattctcagaaactgctttgggatgtttcaattgaagtcccagtgttgaacattcccattcatagagcaggtttgaaacactctttttgtaatatctggaagtggacatttggagcgctttcaggtctacggtgaaaaaggagatatcttccaataaaaactagatagaagcaatgtcagaacttttttcatgatgtatctactcagcaaacagagttgaacctttcttttgagagagcagttttgaaacactctttttgtggaatatgcaagtgggtattaggccagcttggaggatttcgttggaaacgggaatacgtataaaaagcagacagcagaattgtcagaaactactttgtgatgtttgcattcaagtcacagaattgaacactccctttcacagagcaggtttgaaacactctttttgtagtgtctgtaagtgaacatttggattgctttcaggcgtaaggtgaaaaaggaaatatcttcccataaaaactagacagaagcattctcagaaacttgttcgtgatgtgtgccctctactgacagagttgaacctttctttgcaaagagcagttttgaaacactctttttgtagaatctgcaagaggatatatggatagctttgaggatttcgttggaaacgggaatgtcttcagataaactctagacagaagcattctcagaaacttctttgggatgtttcaattgaagtcacagtgttgaacattccctttcacagagcaggtttgaaacactctttttgtagtgtctataagtgaacatttggcgtgctttcaggcctaacgtgaaaaaggaaatatcttcccataaaaactagacagaagtattctcagaaacttgttcttgatgtgtcccctctactgacagagttgaacctttctttgcaaagagcagctttgaaacactctttttgtagaatctgcaagaggatatttggatagcttggaggatttcgttggaaacgggtatgtcttcagataaactctagacagaagcattctcagaaacttctttgggatgttgcattcaagtcacagagtagaacattcccattcatagagcagatttgaaacactctttttgtagtatctggaagtggacatttggagcgctttcaggcctatgttgaaaaaggaaatatcttcccataaaaactagacggaagcattctcagaaacttacttgtgatgtgtttgctcaactaacagaattgaaccatcgttttgaaggagcagttttgaaacactgttttcgtggaatctgcaagtggatatttggctagctttgaggatttcgttggaaacgggattacatataaaaaggagacagcagcattctcagaaacttctttgtgatgtttgcattcaagtcacagagttgaacattccctttcatagagcaggtttgaaacactctttttgtagtatctggatgtggacatttggatcgctttcaggcctatggtgaaaaaggaaatatcttcccatgaaaactagacagaagcattctcagaaacttatttgcgatgtgtgccctcaactgacagtgttgaacctttgttttgatagagcagttctgaaacacactttttgtaaaatctgcaagaggatatttggatagctttgaggatttcgttggaaacgggaatgtcttcatgtaaacttctggacagaagcattctcagcaaactgctttgggatgtttcaattgaagtcccagtgttgaacattccctttcatagagcaggtttgaaacactctttttgtactatctggaagtggacatttggagcgctttcaggtctacggtgaaaaaggagatatcttccaataaaaactagatagaagcaatgtcagaacttttttcatgatgtatctactcagcaaacagagttgaacctttcttttgagagagcagttttgaaacactctttttgtggaatatgcaagtgggtattaggccagcttggaggatttcgttggaaacgggaatacgtataaaaagcagacagcagcattgtcagaaactactttgtgatgtttgcattcaagtcacagaattgaacactccctttcacagagcaggtttgaaacactctttttgtagtgtctgtaagtgaacatttggattgctttcaggcctaaggtgaaaaaggaaatatcttcccataaaaactagacagaagcattctcagaaacttgtttgtgatgtgtgccctctactgacagagttgaacctttctttgcaaagagcagttttgaaacactctttttgtagaatctgcaagaggatatttggatagctttgaggatttcttgggaaacgggaatgtcttcagataaactctagacagaagcattctcagaaacttctttgggatgtttcaattgaagtcacagtgttgaacattccctttcacagagcaggtttgaaacactctttttgtagtgtctgtaagtgaacatttggcgtgctttcaggcctaacgtgaaaaaggaaatatcttcccataaaaactagacagaagcattctcagaaacttgttcgtgatgtgtgccctctactgacagagttgaacctttctttgcaaagagcagctttgaaacactctttttgtagaatctgcaagaggatatgtggatagctttgaggatttcgttggaaacgggtatgtcttcagataaactctagacagaagcattctcagaaacttctttgggatgttgcattcaagtcacagagtagaacattcccattcatagagcagatttgaaacactctttttgtagtatctggaagtggacatttggagcgctttcaggcctatgttgaaaaaggaaatatcttcccataaaaactagacggaagcattctcagaaacttacttgtgatgtgtttgctcaactaacagaattgaaccatcgttttgaaggagcagttttgaaacactgttttcgtggaatctgcaagtggatatttggctagctttgaggatttcgttggaaacgggattacatataaaaaggagacagcagcattctcagaaacttctttgtgatgtctgcattcaagtcacagagttgagcattccctttcatagagcaggttggaaacactctttttgtagtatctggatgaggacatttggagcgctttcaggcgtatggtgaaaaaggaaatatcttcccgtaaaaactagacagaagcattctcagaagtttatttgtgatgtgtgccttcaactaacagagttgaaactttcttttgatagagcagttttgaaacactcattttgtaaaatctgcaagaggatatttggatagctttgaggatttcgttgcaaacgggaatggcttcatataaactctagacagaagcattctcagaaacttcgtcgggatgtttcgattgaagtcccagtgttgaacattcccttttatagagcaggttggaaacactctttctgcattccctggaagtggacaattggagcgctttcaggacgacggtgaaaatggaaatatcttccaataaaatctggatagaagcaacgtcagaaacttttctgtgatggatctactcagctaacagagttgaacctttcttttgagagagcagttttgcaacactctttttgtggaatatgcaagtggatattagggcagctttgaggatttcgttggaaacgggaatacatgtaaaaagcagacagcagcattctcagaaacttctttgtgatgtttgcattgaagtcacagagttgaacattccctttgagagagcaggtttgaaacacgccttttgtcatatctggaagtgtccattcggagcgcattcaggcttgtgttgaaaaaggaaatatcctcccataaaaactagacagaagcattctcagaaacttatctgtgatgtatgtactcaactaacagaactaaaccatcgttttgaaggagcagttttgaaacactctttttgcggaatctgcaagtggatatttggctagctgggaggatttcgttggaaacgggattacatacaaaaagcagacagcagcattctcagaaacttatttgtgatgtgtgccctcaactgacagtgttgaacctttgttttgatagagcagttctgaaacacactttttgtaaaatctgcaagaggatatttggatagctttgaggatttcgttggaaacgggaatgtcttcatgtaaactctagacagaagcattctcagaaactgctttgggatgtttcaattgaagtcccagtgttgaacattcccattcatagagcaggtttgaaacactctttttgtactatctggaagtggacatttggagcgctttcaggtctacggtgaaaaaggagatatcttccaataaaaactagatagaagcaatgtcagaacttttttcatgatgtatctactcagcaaacagagttgaacctttcttttgagagagcagttttgaaacactctttttgtggaatatgcaagtgggtattaggccagcttggaggatttcgttggaaacgggaatacgtataaaaagcagacagcagcattgtcagaaactactttgtgatgtttgcattcaagtcacagaattgaacactccctttcacagagcaggtttgaaacactctttttgtagtgtctgtaagtgaacatatggattgctttcaggcctaaggtgaaaaaggaaatatcttcccataaaaactagacagaagcattctcagaatcttgtttgtgatgtgtgccctctactgacagagttgaacctttctttgcaaagaccagttttgaaacactctttttgtagaatctgcaagaggatatttggatagctttgaggatttcttgggaaacgggaatgtcttcagataaactctagacagaagcattctcagaaacttctttgggatatttcaattgaagtcacagtgttgaacattccctttcacagagcaggtttgaaacactctttttgtagtgtctataagtgaacatttggcgtgctttcaggcgtaacgtgaaaaaggaaatatcttcccataaaaacgagacagaagcattctcagaaacttgttcgtgatgtgtgccctctactgacagagttgaacctttctttgcaaagagcagctttgaaacactctttttgtagaatctgcaagaggatatttggatagctttgaggatttcgttggaaacgggtatgtcttcagataaactctagacagaagcattctcagcaaacttctttgggatgttgcattcaagtcacagagtagaacattcccattcatagagcagatttgaaacactctttttgtagtatctggaagtggacatttggagcgctttcaggcctatgttgaaaaaggaaatatcttcccataaaaactagacggaagcattctcagaaacttatttgtgatgtgtttgctcaactaacaggattgaaccatcgttttgaaggagcagttttgaaacactgttttcgtggaatctgcaagtggatatttggctagctttgaggatttcgttggaaacgggattacatataaaaaggagacagcagcattctcagaaacttctttgtgatgtctgcattcaattcacagagttgagcattccctttcatagagcaggttggaaacactctttttgtagtatctggatgaggacatttggagcgctttcaggcctatggtgaaaaaggaaatatcttcccgtaaaaactagacagaagcattctcagaagtttatttgtgatgtgtgccctcaactaacagagttgaacctttcttttgatagagcagttttgaaacactctttttgtaaaatctgcaagaggatatttggatagctttgaggatttcgttgcaaacgggaatggcttcatataaactctagacagaagcattctcagaaacttcgttgggatgtttcgattgaagtcccagtgttgaacattcccttttatagagcaggttggaaacactctttctgcattccctggaagtggacatttggagcgctttcaggacgacggtgaaaatggaaatatcttccaagaaaatctagatagaagcaacgtcagaaacttttatgtgatggatctactcagctaacagagttgaacctttcttttgagagagcagttttgcaacactctttttgtggaatatgcaagtggatattagggcagctttgaggatttcgttggaaacgggaatacatgtaaaaagcagacagcagcattctcagaaacttctttgtgatgtttgcattgaagtcacagagttgaacattccctttgagagagcaggtttgaaacacgccttttgtcatatctggaagtgtccattcggagcgcattcaggcttgtgttgaaaaaggaaatatcctcccataaaaactagacagaagcattctcagaaacttatctgtgatgtatgtactcaactaacagaactaaaccatcgttttgaaggagcagttttgaaacactctttttgcggaatctgcaagtggatatttggctagctgggaggatttcgttggaaacgggattacatacaaaaagcagacagcagcattctcagaaacttatttgtgatgtgtgccctcaactgacagtgttgaacctttgttttgatagagcagttctgaaacacactttttgtaaaatctgcaagaggatatttggatagctttgaggatttcgttggaaacgggaatgtcttcatgtaaactctagacagaagcattctcagaaactgctttgggatgtttcaattgaagtcccagtgttgaacattcccattcatagagcaggtttgaaacactctttttgtactatctggaagtggacatttggagcgctttcaggtctacggtgaaaaaggagatatcttccaataaaaactagatagaagcaatgtcagaacttttttcatgatgtatctactcagcaaacagagttgaacctttcttttgagagagcagttttgaaacactccttttgtggaatatgcaagtgggtattaggccagcttggaggatttcgttggaaacgggaatacgtataaaaagcagacagcagcattgtcagaaactactttgtgatgtttgcattcaagtcacagaattgaacactccctttcacagagcaggtttgaaacactctttttgtagtgtctgtaagtgaacatttggattgctttcaggcctaaggtgaaaaaggaaatatcttcccataaaaactagacagaagcattctcagaaacttgtttgtgatgtgtgccctctactgacagagttgaacctttctttgcaaagagcagttttgaaacactctttttgtagaatctgcaagaggatatttggatagctttgaggatttcttgggaaacgggaatgtcttcagataaactctagacagaagcattctcagaaacttctttgggatgtttcaattgaagtcacagtgttgaacattccctttcacagagcaggtttgaaacactctttttgtagtgtctataagtgaacatttggcgtgctttcaggcctaacgtgaaaaaggaaatatcttcccataaaaactagacagaagcattctcagaaacttgttcgtgatgtgtgccctctactgacagagttgaacctttctttgcaaagagcagctttgaaacacactttttgtagaatctgcaagaggatatttggatagcttggaggatttcgttggaaacgggtatgtcttcagataaactctagacagaagcattctcagaaacttctttgggatgttgcattcaagtcacagagtagaacattcccattcatagagcagatttgaaacactctttttgtagtatctggaagtggacatttggagcgctttcaggcctatgttgaaaaaggaaatatcttcccataaaaactagacggaagcattctcagaaacttacttgtgatgtgtttgctcaactaacagaattgaaccatcgttttgaaggagcagttttgaaacactgttttcgtggaatctgcaagtggatatttggctagctttgaggatttcgttggaaacgggattacatataaaaaggagacagcagcattctcagaaacttctttgtgatgtctgcattcaagtcacagagttgagcattccctttcatagagcaggttggaaacactctttttgtagtatctggatgaggacatttggagcgctttcaggcgtatggtgaaaaaggaaatatcttcccgtaaaaactagacagaagattctcagaaatttatttgtgatgtgtgccctcaactaacagagttgaacctttcttttgatagagcagttttgaaacactctttttgtaaaatctgcaagaggatatttggatagctttgaggatttcgttgcaaacgggaatggcttcatataaactctagacagaagcattctcagaaacttcgttgggatgtttcgattgaagtcccagtgttgaacattcccttttatagagcaggttggaaacactctttctgcattccctggaagtggacatttggagcgctttcaggacgacggtgaaaatggaaatatcttccaagaaaatctagatagaagcaacgtcagaaacttttctgtgatggatctactcagctaacagagttgaacctttcttttgagagagcagttttgcaacactctttttgtggaatatgcaagtggatattagggcagctttgaggatttcgttggaaacgggaatacatgtaaaaagcagacagcagcattctcagaaacttctttgtgatgtttgcattgaagtcacagagttgaacattccctttgagagagcaggtttgaaacacgccttttgtcatatctggaagtgtccattcggagcgcattcaggcttgtgttgaaaaaggaaatatcctcccataaaaactagacagaagcattctcagaaacttatctgtgatgtatgtactcaactaacagaactaaaccatcgttttgaaggagcagttttgaaacactctttttgcggaatctgcaagtggatatttggctagctgggaggatttcgttggaaacgggattacatacaaaaagcagacagcagcattctcagaaacttatttgtgatgtgtgccctcaactgacagtgttgaacctttgttttgatagagcagttctgaaacacactttttgtaaaatctgcaagaggatatttggatagctttgaggatttcgttggaaacgggaatgtcttcatgtaaactctacacagaagcattctcagaaactgctttgggatgtttcaattgaagtcccagtgttgaacattcccattcatagagcaggtttgaaacactctttttgtactatctggaagtggacatttggagcgctttcaggtctacggtgaaaaaggagatatcttccaataaaaactagatagaagcaatgtcagaacttttttcatgatatatctactcagctaacagagttgaacctttcttttgagagagcagttttgaaacactctttttgtggaatatgcaagtgggtattaggccagcttggaggatttcgttggaaacgggaatacgtataaaaagcagacagcagcattgtcagaaactactttgtgatgtttgcattcaagtcatagaattgaacactccctttcacagagcaggtttgaaacactctttttgtagtgtctgtaagtgaacatttggattgctttcaggcctaaggtgaaaaaggaaatatcttcccataaaaactagacagaagcattctcagtaaacttgtttgtgatgtgtgccctctactgacagagttaaacctttctttgcaaagagcagttttgaaacactctttttgtagaatctgcaagaggatatttggatagctttgaggatttcctgggaaacgggaatgtcttcagataaactctagacagaagcattctcagaaacttctttgggatgtttcaattgaagtcacagtgttgaacattccctttcacagagcaggtttgaaacactctttttgtagtgtctataagtgaacatttggcgtgctttcaggcctaacgtgaaaaaggaaatatcttcccataaaaactagacagaagcattctcagaaacttgttcgtgatgtgtgccctctactgacagagttgaacctttctttgcaaagagcagctttgaaacactctttttgtagaatctgcaagaggatatttggatagcttggaggatttcgttggaaacggggatgtcttcagataaactctagacagaagcattctcagaaacttctttgggatgttgcattcaagtcacagagtagaacattcccattcatagagcagatttgaaacactctttttgtagtatctggaagtggacatttggagcgctttcaggcctatgttgaaaaaggaaatatcttcccataaaaactagacggaagcattctcagaaacttacttgtgatgtgtttgctcaactaacagaattgaaccatcgttttgaaggagcagttttgaaacactgttttcgtggaatctgcaagtggatatttggctagctttgaggatttcgttggaaacgggattacatataaaaaggagacagcagcattctcagaaacttctttgtgatgtttgcattcaagtcacagagttgaacattccctttcatagagcaggtttgaaacactctttttgtagtatctggatgtggacatttggatcgctttcaggcctatggtgaaaaaggaaatatcttcccatgaaaactagacagaagcattctcagaaacttatttgtgatgtgtgccctcaactgacagtgttgaacctttgttttgatagagcagttctgaaacacactttttgtaaaatctgcaagaggatatttggatagctttgaggatttcgttggaaacgggaatgtcttcatgtaaactctagacagaagcattctcagaaactgctttgggatgtttcaattgaagtcccagtgttgaacattcccattcatagagcaggtttgaaacactctttttgtactatctggaagtggacatttggagcgctttcaggtctacggtgaaaaaggagatatcttccaataaaaactagatagaagcaatgtcagaacttttttcatgatgtatctactcagcaaagagagttgaacctttcttttgagagagcagttttgaaacactctttttgtggaatatgcaagtgggtattaggccagcttggaggatttcgttggaaacgggaatatgtataaaaagcagacagcagcattctcagaaacttcgttgggatgtttcgattgaagtcacagtgctgaacattcccttttatagagcaggtttgaaacactgtttttgtagtatctggaagtggacatttggagcgctttcaggacgacggtgaaaatggaaatatcttccaataaaatctagatagaagcaatgtcagaaactttcatgtcatgtatctactcagctaacagagttgaacctttattttgagagagcagttttgcaacactcttttcgtggaatattcaagtggatattagggcagctttgaggatttagttggaaacgggaatacatataaaaagcagacagcagcattctcagaaacttcttcgtgatgtttgctttgaagtcacagatttgaacattccctttcacagagcaagtttgaaacactctttttgtagtgtctataagtgaacatttggcgtgctttcaggcctaacgtgaaaaaggaaatatcttcccataaaaactagacagaagcattctcagaaacttacttctgacgtgtttactcaactaacagaattgaaccatcattttgaaggagcagttttgaaacactgtttttgtggaatctgcaagtggatatttggctagctttgaggatttcgttggaaacgggattatatataaaaaggagacagcagcattcttagaaactattttgtgatgtctgcattcaagtcaaagagttgagcattccctttcatagagcaggtttgaaacagtctttttgtagtatctggatgaggacatttggagcgctttcaggcgtatggtgaaaaaggaaatatcttcccgtaaaaactagacagaagcattctcaaaaatttacttgtgatgtgtgccctcaactaacagagttgaacctttcttttgatagagcagttttgaaacactctttttgtaaaatctgcaagaggatatttggatagctttgaagatttcgttgcaaacgggaatggcttcatataaactctagacagaagcattctcagaaacttcgttgggatgtttcgattgaagtcccagtgttgaacattcccttttatagagcaggttggaaacactctttctgcattccctggaagtggacatttggagcgctttcaggacgacggtgaaaatggaaatatcttccaagaaaatctagatagaagcaacgtcagaaacttttctgtgatggatctactcagctaacagagttgaacctttcttttgagagagcagttttgcaacactctttttgtggaatatgcaagtggatattagggcagctttgaggatttcgttggaaacgggaatacatgtaaaaagcagacagcagcattctcagaaacttctttgtgatgtttgcattgaagtcacagagttgaacattccctttgagagagcaggtttgaaacacgccttttgtcatatctggaagtgtccattcggagcgcattcaggcttgtgttgaaaaaggaaatatcctcccataaaaactagacagaagcattctcagaaacttatctgtgatgtatgtactcaactaacagaactaaaccatcgttttgaaggagcagttttgaaacactctttttgcggaatctgcaagtggatatttggctagctgggaggatttcgttggaaacgggattacatacaaaaagcagacagcagcattctcagaaacttatttgtgatgtgtgccctcaactgacagtgttgaacctttgttttgatagagcagttctgaaacacactttttgtaaaatctgcaagaggatatttggatagctttgaggatttcgttggaaacgggaatgtcttcatgtaaactctagacagaagcattctcagaaactgctttgggatgtttcaattgaagtcccagtgttgaacattcccattcatagagcaggtttgaaacactctttttgtactatctggaagtggacatttggagcgctttcaggtctacggtgaaaaaggagatatcttccaataaaaactagatagaagcaatgtcagaacttttttcatgatgtatctactcagcaaacagagttgaacctttcttttgagagagcagtttcgaaacactctttctgtggaatatgcaagtgggtattaggccagcttggaggatttcgttggaaacgggaatacgtataaaaagcagacagcagcattgtcagaaactactttgtgatgtttgcattcaagtcacagaattgaacactccctttcacagagcaggtttgaaacactctttttgtagtgtctgtaagtgaacatttggattgctttcaggcctaaggtgaaaaaggaaatatcttcccataaaaactagacagaagcattctcagaaacttgtttttgatgtgtgccctctactgacagagttgaacctttctttgcaaagagcagttttgaaacactctttttgtagaatctgcaagaggatatttggatagctttgaggatttcttgggaaacgggaatgtcttcagataaactctagacagaatcattctcagaaacttctttgggatgtttcaattgaagtcacagtgttgaacattccctttcacagagcaggtttgaaacactctttttgtagtgtctataagtgaacatttggcgtgctttcaggcctaacgtgaaaaaggaaatatcttcccataaaaactagacagaagcattctcagaaacttgttcgtgatgtgtgccctctactgacagagttgaacctttctttgcaaagagcagctttgaaacacactttttgtagaatctgcaagaggatatttggatagctttgaggatttcgttggaaacgggtatgtcttcagataaactctagacagaagcattctcagaaacttctttgggatgttgcattcaagtcacagagtagaacattcccattcatagagcagatttgaaacactctttttgtagtgtctggaagtggacatttggagcgctttcaggcctatgttgaaaaaggaaatatcttcccataaaaactagacggaagcattctcagaaacttatttgtgatgtgtttgctcaactaacaggattgaaccatcgttttgaaggagcagttttgaaacactgttttcgtagaatctgcaagtggatatttggctagctttgaggatttcgttggaaacgggattacatatacaaaggagacagcagcattctcagaaacttctttgtgatgtctgcattcaattcacagagttgagcattccctttcatagagcaggttggaaacactctttttgtagtatctggatgaggacatttggagcgctttctggcctatggtgaaaaaggaaatatcttcctgtaaaaactagacagaagcattctcagaaatttatttgtgatgtgtgccctcaactaacagagttgaacctttcttttgatagagcagttttgaaacactctttttgtaaaatctgcaagaggatatttggatagctttgaggatttcgttgcaaacgggaatggcttcatataaactctagacagaagcattctcagaaacttcgttgggatgtttcgattgaagtcccagtgttgaacattcccttttatagagcaggttggaaacactctttctgcattccctggaagtggacatttggagcgctttcaggacggcggtgaaaatggaaatatcttccaagaaaatctagatagaagcaatgtcagaaacttttatgtgatggatctactcagctaacagagttgaacctttcttttgagagagcagttttgcaacactctttttgtggaatatgcaagtggatattagggcagctttgaggatttcgttggaaacgggaatacatgtaaaaagcagacagcagcattctcagaaacttctttgtgatgtttgcattgaagtcacagagttgaacattccctttgagagagcaggtttgaaacacgccttttgtcatatctggaagtgtccattcggagcgcattcaggcttgtgttgaaaaaggaaatatcctcccataaaaactagacagaagcattctcagaaacttatctgtgatgtatgtactcaactaacagaactaaaccatcgttttgaaggagcagttttgaaacactctttttgcggaatctgcaagtggatatttggctagctgggaggatttcgttggaaacgggattacatacaaaaagcagacagcagcattctcagaaacttatttgtgatgtgtgccctcaactgacagtgttgaacctttgttttgatagagcagttctgaaacacactttttgtaaaatctgcaagaggatatttggatagctttgaggatttcgttggaaacgggaatgtcttcatgtaaactctagacagaagcattctcagaaactgctttgggatgtttcaattgaagtcccagtgttgaacattccctttcatagagcaggtttgaaacactctttttgtactatctggaagtggacatttggagcgctttcaggtctacggtgaaaaaggagatatcttccaataaaaactagatagaagcaatgtcagaacatttttcatgatgtatctactcagcaaacagagttgaacctttcttttgagagagcagttttgaaacactctttttgtggaatatgcaagtgggtattaggccagcttggaggatttcgttggaaacgggaatacgtataaaaagcagacagcagcattgtcagaaactactttgtgatgtttgcattcaagtcacagaattgaacactccctttcacagagcaggtttgaaacactctttttgtagtgtctgtaagtgaacatttggattgctttcaggcctaaggtgaaaaaggaaatatcttcccataaaaactagacagaagcattctcagaaacttgtttgtgatgtgtgccctctactgacagagttgaacctttctttgcaaagagcagttttgaaacactctttttgtagaatctgcaagaggatatttggatagctttgaggatttcttgggaaacgggaatgtcttcagataaactctagacagaagcattctcagaaacttctttgggatgtttcaattgaagtcacagtgttgaacattccctttcacagagcaggtttgaaacactctttttgtagtgtctataagtgaacatttggcgtgctttcaggcgtaacgtgaaaaaggaaatatcttcccataaaaactagacagaagcattctcagaaacttgttcgtgatgtgtgccctctactgacagagttgaacctttctttgcaaagagcagctttgaaacacactttttgtagaatctgcaagaggatatttggatagcttggaggatttcgttggaaacgggtatgtcttcagataaactctagacagaagcattctcagaaacttctttgggatgttgcattcaagtcacagagtagaacattcccattcatagagcagatttgaaacactctttttgtagtatctggaagtggacatttggagcgctttcaggcctatgttgaaaaaggaaatatcttcccataaaaactagacggaagcattctcagaaacttatttgtgatgtgtttgctcaactaacaggattgaaccatcgttttgaaggagcagttttgaaacactgttttcgtggaatctgcaagtggatatttggctagctttgaggatttcgttggaaacgggattacatatacaaaggagacagcagcattctcagaaacttctttgtgatgtctgcattcaagtcacagagttgagcattccctttcatagagcaggttggaaacactctttttgtagtatctggatgaggacatttggagctctttcaggcctatggtgaaaaaggaaatatcttcccgtaaaaactagacagaagcattctcagaagtttatttgtgatgtgtgccctcaactaacagagttgaacctttcttttgatagagcagttttgaaacactctttttgtaaaatctgcaagaggatatttggatagctttgaggatttcgttgcaaacgggaaggcttcatataaactctagacagaagcattctcagaaacttcgttgggatgtttcgattgaagtcccagtgttcaacattcccttttatagagcaggttggaaacactctttctgcattccctggaagtggacaattggagcgctttcaggacgacggtgaaaatggaaatatcttccaataaaatctggatagaagcaatgtcagaaacttttctgtgatggatctactcagctaacagagttgaacctttcttttgagagagcagttttgcaacactctttttgtggaatatgcaagtggatattagggcagctttgaggatttcgttggaaacgggaatacatgtaaaaagcagacagcagcattctcagaaacttctttgtgatgtttgcattgaagtcacagagttgaacattccctttgagagagcaggtttgaaacacgccttttgtcatatctggaagtgtccattcggagcgcattcaggcttgtgttgaaaaaggaaatatcctcccataaaaactagacagaagcattctcagaaacttatctgtgatgtatgtactcaactaacagaactaaaccatcgttttgaaggagcagttttgaaacactctttttgcggaatctgcaagtggatatttggctagctgggaggatttcgttggaaacgggattacatacaaaaagcagacagcagcattctcagaaacttatttgtgatgtgtgccctcaactgacagtgttgaacctttgttttgatagagcagttctgaaacacactttttgtaaaatctgcaagaggatatttggatagctttgaggatttcgttggaaacgggaatgtcttcatgtaaactctagacagaagcattctcagaaactgctttgggatgtttcaattgaagtcccagtgttgaacattccctttcatagagcaggtttgaaacactctttttgtactatctggaagtggacatttggagcgctttcaggtctacggtgaaaaaggagatatcttccaataaaaactagatagaagcaatgtcagaacttttttcatgatgtatctactcagcaaacagagttgaacctttcttttgagagagcagttttgaaacactctttttgtggaatatggaagtgggtattaggccagcttggaggatttcgttggaaacgggaatacgtataaaaagcagacagcagcattgtcagaaactactttgtgatgtttgcattcaagtcacagaattgaacactccctttcacagagcaggtttgaaacactctttttgtagtgtctgtaagtgaacatttggattgcttttaggcctatggtgaaaaaggaaatatcttcccataaaaactagacagaagcattctcagaaacttgtttgtgatgtgtgccctctactgacagagttgaacctttctttgcaaagagcagttttgaaacactctttttgtagaatctgcaagaggatatttggatagctttgaggatttcttgggaaacgggaatgtcttcagataaactctagacagaagcattctcagaaacttctttgggatgtttcaattgaagtcacagtgttgaacattccctttcacagagcaggtttgaaacactctttttgtagtgtctataagtgaacatttggcgtgctttcaggcctaacgtgaaaaaggaaatatcttcccataaaaactagacagaagcattctcagaaacttgttcgtgatgtgtgccctctactgacagagttgaacctttctttgcaaagagcagctttgaaacactctttttgtagaatctgcaagaggatatttggatagctttgaggatttcgttggaaacgggtatgtcttcagataaactctagacagaagcattctcagaaacttctttgggatgttgcattcaagtcacagagtagaacattcccattcatagagcagatttgaaacactctttttgtagtatctggaagtggacatttggagcgctttcaggcctatgttgaaaaaggaaatatcttcccataaaaactagacggaagcattctcagaaacttatttgtgatgtgtttgctcaactaacaggattgaaccatcgttttgaaggagcagttttgaaacactgttttcatggaatctgcaagtggatatttggctagctttgaggatttcgttggaaacgggattacatataaaaaggagacagcagcattctcagaaacttctttgtgatgtctgcattcaattcacagagttgagcattccctttcatagagcaggttggaaacactctttttgtagtatctggatgaggacatttggagcgctttcaggcgtatggtgaaaaaggaaatatcttcccgtaaaaactagacagaagcattctcagaaatttatttgtgatgtgtgccctcaactaacagagttgaacctttcttttgatagagcagttttgaaacactctttttgtaaaatctgcaagaggatatttggatagctttgaggatttcgttgcaaacgggaatggcttcatataaactctagacagaagcattctcagaaacttcgttgggatgtttcgattgaagtcccagtgttgaacattcccttttatagagcaggttggaaacactctttctgcattccctggaagtggacaattggagcgctttcaggacgacggtgaaaatggaaatatcttccaataaaatctggatagaagcaatgtcagaaacttttatgtgatggatctactcagctaacagagttgaacctttcttttgagagagcagttttgcaacactctttttgtggaatatgcaagtggatattagggcagctttgaggatttcgttggaaacgggaatacatgtaaaaagcagacagcagcattctcagaaacttctttgtgatgtttgcattgaagtcacagagttgaacattccctttgagagagcaggtttgaaacacgccttttgtcatatctggaagtgtccattcggagcgcattcaggcttgtgttgaaaaaggaaatatcctcccataaaaactagacagaagcattctcagaaacttatctgtgatgtatgtactcaactaacagaactaaaccatcgttttgaaggagcagttttgaaacactctttttgcggaatctgcaagtggatatttggctagctgggaggatttcgttggaaacgggattacatacaaaaagcagacagcagcattctcagaaacttatttgtgatgtgtgccctcaactgacagtgttgaacctttgttttgatagagcagttctgaaacacactttttgtaaaatctgcaagaggatatttggatagctttgaggatttcgttggaaacgggaatgtcttcatgtaaactctacacagaagcattctcagaaactgctttgggatgtttcaattgaagtcccagtgttgaacattccctttcatagagcaggtttgaaacactctttttgtactatctggaagtggacatttggagcgctttcaggtctacggtgaaaaaggagatatcttccaataaaaactagatagaagcaatgtcagaacttttttcatgatgtatctactcagcaaacagagttgaacctttcttttgagagagcagttttgaaacactctttttgtggaatatgcaagtgggtattaggccagcttggaggatttcgttggaaacgggaatacgtataaaaagcagacagcagcattgtcagaaactactttgtgatgtttgcattcaagtcacagaattgaacactccctttcacagagcaggtttgaaacactctttttgtagtgtctgtaagtgaacatttggattgctttcaggcctaaggtgaaaaaggaaatatcttcccataaaaactagacagaagcattctcagaaacttgtttgtgatgtgtgccctctactgacagagttgaacctttctttgcaaagagcagttttgaaacactctttttgtagaatctgcaagaggatatttggatagctttgaggatttcttgggaaacgggaatgtcttcagataaactctagacagaagcattctcagaaacttctttgggatgtttcaattgaagtcacagtgttgaacattccctttcacagagcaggtttgaaacactctttttgtagtgtctataagtgaacatttggcgtgctttcaggcctaacgtgaaaaaggaaatatcttcccataaaaactagacagaaagcattctcagaaaacttgttcgtgatgtgtgccctctactgacagagttgaacctttctttgcaaagagcagctttgtaacacactttttgtagaatctgcaagaggatatttggatagctttgaggatttcgttggaaacgggtatgtcttctgataaactctagacagaagcattctcagaaacttctttgggatgttgcatgcaagtcacagagtagaacattcccattcataaatcagatttgaaacactctttttgtagtatctggaagtggacatttggagcgctttcaggcctatgttgaaaaaggaaatatcttcccataaaaactagacggaagcattctcagaaacttatttgtgatgtgtttgctcaactaacaggattgaaccatcgttttgaaggagcagttttgaaacactgttttcgtggaatctgcaagtggatatttggctagctttgaggatttcgttggaaacgggattacatataaaaaggagacagcagcattctcagaaacttctttgtgatgtctgcattcaagtcacaggagttgagcattccctttcatagagcaggttggaaacactctttgtgtagtatctggatgaggacatttggagcgctttcaggcgtatggtgaaaaaggaaatatcttcccgtaaaaactagacagaagcattctcagaaatttatttgtgatgtgtgccctcaactaacagagttgaacctttcttttgatagagcagttttgaaacactctttttgtaaaatctgcaagaggatatttggatagctttgaggatttcgttgcaaacgggaatggcttcatataaactctagacagaagcattctcagaaacttcgttgggatgtttcgattgaagtcccagtgttgaacattcccttttatagagcaggttggaaacactctttctgcattccctggaagtggacatttggagcgctttcaggacgacggtgaaaatggaaatatcttccaagaaaatctagatagaagcaatgtcagaaacttttatgtgatggatctactcagctaacagagttgaagctttcttttgagagagcagttttgcaacactctttttctggaatatgcaagtggatattagggcagctttgaggatttcgttggaaacgggaatacatgtaaaaagcagacagcagcattctcagaaacttctttgtgatgtttgcattgaagtcacagagttgaacattccctttgagagagcaggtttgaaacacgccttttgtcatatctggaagtgtccattcggagcgcattcaggcttgtgttgaaaaaggaaatatcctcccataaaaactagacagaagcattctcagaaacttatctgtgatgtatgtactcaactaacagaactaaaccatcgttttgaaggagcagttttgaaacactctttttgcggaatctgcaagtggatatttggctagctgggaggatttcgttggaaacgggattacatacaaaaagcagagagcagcattctcagaaacttatttgtgatgtgtgccctcaactgacagtgttgaacctttgttttgatagagcagttctgaaacacactttttgtaaaatctgcaagaggatatttggatagctttgaggatttcgttggaaacgggaatgtcttcatgtaaactctagacagaagcattctcagaaactgctttgggatgtttcaattgaagtcccagtgttgaacattccctttcataggagcaggtttgaaacactctttttgtactatctggaagtggacatttggagcgctttcaggtctacggtgaaaaaggagatatcttccaataaaaactagatagaagcaatgtcagaacttttttcatgatgtatctactcagcaaacagagttgaacctttcttttgagagagcagttttgacacagtctttgtggaatatgcaagtgggtattaggccagcttggaggatttcgttggaaacgggaatacgtataaaaagcagacagcagcattgtcagaaactactttgtgatgtttgcattcaagtcacagaattgaacactccctttcacagagcaggtttgaaacactctttttgtagtgtctgtaagtgaacatttggattgctttcaggcctaaggtgaaaaaggaaatatcttcccataaaaactagacagaagcattctcagaaacttgtttgtgatgtgtgccctctactgacagagttgaacctttctttgcaaagaccagttttgaaacactctttttgtagaatctgcaagaggatatttggatagctttgaggatttcttgggaaacgggaatgtcttcagataaactctagacagaagcattctcagaaacttctttgggatgtttcaattgaagtcacagtgttgaacattccctttcacagagcaggtttgaaacactctttttgtagtgtctataagtgaacatttggcgtgctttcaggcgtaacgtgaaaaaggaaatatcttcccataaaaaccagacagaagcattctcagaaacttgttcgtgatgtgtgccctctactgacagagttgaacctttctttgcaaagagcagctttgaaacactctttttgtagaatctgcaagaggatatttggatagcttggaggatttcgttggaaacgggtatgtcttcagataaactctagacagaagcattctcagaaacttctttgggatgttgcattcaagtcacagagtagaacattcccattcatagagcagatttgaaacactctttttgtagtatctggaagtggacatttggagcgctttcaggcctatgttgaaaaaggaaatatcttcccataaaaactagacggaagcattctcagaaacttaattgtgatgtgtttgctcaactaacaggattgaaccatcgttttgaaggagcagttttgaaacactgttttcgtggaatctgcaagtggatatttggctagctttgaggatttcgttggaaacgggattacatataaaaaggagacagcagcattctcagaaacttctttgtgatgtttgcattcaagtcacagagttgaacattccctttcatagagcaggtttgaaacactctttttgtagtatctggatgtggacatttggatcgctttcaggcctatggtgaaaaaggaaatatcttcccatgaaaactagacagaagcattctcagaaacttattggtgatgtgtgccctcaactgacagtgttgaaactttgttttgatagagcagttctgaaacacactttttgtaaaatctgcaagaggatatttggatagctttgaggatttcgttggaaacgggaatgtcttcatgtaaactctggacagaagcattctcagaaactgctttgggatgtttcaattgaagtcccagtgttgaacattcccattcatagagcaggtttgaaacactctttttgtactatctggaagtggacatttggagcgctttcaggtctacggtgaaaaaggagatatcttccaataaaaactagatagaagcaatgtcagaacttttttcatgatgtatctactcagcaaacagagttgaacctttcttttgagagagcagttttgaaacactctttttgtggaatatgcaagtgggtattaggccagcttggaggatttcgttggaaacgggaatacgtataaaaagcagacagcagcattgtcagaaactactttgtgatgtttgcattcaagtcacagaattgaacactccctttcacagagcaggtttgaaacactctttttgtagtgtctgtaagtgaacatatggattgctttcaggcctaaggtgaaaaaggaaatatcttcccataaaaactagacagaagcattctcagaaacttgtttgtgatgtgtgccctctactgacagagttgaacctttctttgcaaagaccagttttgaaacactctttttgtagaatctgcaagaggatatttggatagctttgaggatttcttgggaaacgggaatgtcttcagataaactctagacagaagcattctcagaaacttctttgggatgtttcaattgaagtcacagtgttgaacattccctttcacagagcaggtttgaaacactctttttgtagtgtctataagtgaacatttggcgtgctttcaggcctaacgtgaaaaaggaaatatcttcccataaaaactagacagaagcattctcagaaacttgtttgtgatgtgtgccctctactgacagagttgaacctttctttgcaaagagcagctttgaaacactctttttgtagaatctgcaagaggatatttggatagctttgaggatttcgttggaaacgggtatgtcttcagataaactctagacagaagcattctcagaaacttctttgggatgctgcattcaagtcacagagtagaacattcccattcatagagcagatttgaaacactctttttgtagtatctggaagtggacatttggagcgctttcaggcctatgttgaaaaaggaaatatcttgccataaaaactagacggaagcattttcagaaacttacttgtgatgtgtttgctcaactaacagaattgaaccatcgttttgaaggagcacttttgaaacactgttttcgtggaatctgcaagtggatatttggctagctttgaggatttcgttggaaacgggattacctataaaaaggagacagcagcattctcagaaacttctttgtgatgtttgcattcaagtcacagagttgaacattccctttcatagagcaggtttgaaacactctttttgtagtatctggatgtggacatttggatcgctttcaggcctatggtgaaaaaggaaatatcttcccatgaaaactagacagaagcattctcagaaacttatttgtgatgtgtgccctcaactgacagtgttgaacctttgttttgatagagcagttctgaaacacactttttgtaaaatctgcaagaggatatttggatagctttgaggatttcgttggaaacgggaatgtcttcatgtaaactctagacagaagcattctcagaaactgctttgggatgtttcaattgaagtcccagtgttgaacattccctttcatagagcaggtttgaaacactctttttgtactatctggaagtggacatttggagcgctttcaggtctacggtgaaaaaggagatatcttccaataaaaactagatagaagcaatgtcagaacttttttcatgatgtatctactcagcaaacagagttgaacctttcttttgagagagcagttttgaaacactctttttgtggaatatgcaagtgggtattaggccagcttggaggatttcgttggaaacgggaatacgtataaaaagcagacagcagcattgtcagaaactactttgtgatgtttgcattcaagtcacagaattgaacactccctttcacagagcaggtttgaaacactctttttgtagtgtctgtaagtgaacatatggattgctttcaggcctaaggtgaaaaaggaaatatcttcccataaaaactagacagaagcattctcagaaacttgtttgtgatgtgtgccctctactgacagagttgaacctttctttgcaaagagcagttttgaaacactctttttgtagaatctgcaagaggatatttggatagctttgaggatttcttgggaaacgggaatgtcttcagataaactctagacagaagcattctcagaaacttctttgggatgtttcaattgaagtcacagtgttgaacattccctttcacagagcaggtttgaaacactctttttgtagtgtctataagtgaacatttggcgtgctttcaggcgtaacgtgaaaaaggaaatatcttcccataaaaactagacagaagcattctcagaaacttgttcttgatgtgtgccctctactgacagagttgaacctttctttgcaaaaagcagctttgaaacactctttttgtagaatctgcaagaggatatttggatagcttggaggatttcgttggaaacgggtatgtcttcagataaactctagacagaagcattctcagaaacttctttgggatgttgcattcaagtcacagagtagaacattcccattcatagagcagatttgaaacactctttttgtagtatctggaagtggacatttggagcgctttcaggcctatgttgaaaaaggaaatatcttcccataaaaactagacggaagcattctcagaaacttatttgtgatgtgtttgctcaactaacaggattgaaccatcgttttgaaggagcagttttgaaacactgttttcgtggaatctgcaagtggatatttggctagctttgaggatttcgttggaaacgggattacatataaaaaggagacagcagcattctcagaaacttctttgtgatgtctgcattcaattcacagagttgagcattccctttcatagagcaggttggaaacactctttttgtagtatctggatgaggacatttggagcgctttcaggcctatggtgaaaaaggaaatatcttcccgtaaaaactagacagaagcattctcagaaatttatttgtgatgtgtgccctcaactaacagagttgaacctttcttttgatagagcagttttgaaacactctttttgtaaaatctgcaagaggatatttggatagctttgaggatttcattgcaaacgggaatggcttcatataaactctagacagaagcattctcagaaacttcgttgggatgtttcgattgaagtcccagtgttgaacattcccttttatagagcaggttggaaacactctttctgcattccctggaagtggacatttggagcgctttcaggacgacggtgaaaatggaaatatcttccaagaaaatctagatagaagcaacgtcagaaacttttctgtgatggatctactcagctaacagagttgaacctttcttttgagagagcagttttgcaacactctttttgtggaatatgcaagtggatattagggcagctttgaggatttcgttggaaacgggaatacatgtaaaaagcagacagcagcattctcagaaacttctttgtgatgtttgcattgaagtcacagagttgaacattccctttgagagagcaggtttgaaacacgccttttgtcatatctggaagtgtccattcggagcgcattcaggcttgtgttgaaaaaggaaatatcctcccataaaaactagacagaagcattctcagaaacttatctgtgatgtatgtactcaactaacagaactaaaccatcgttttgaaggagcagttttgaaacactctttttgcggaatctgcaagtggatatttggctagctgggaggatttcgttggaaacgggattacatacaaaaagcagacagcagcattctcagaaacttatttgtgatgtgtgccctcaactgacagtgttgaacctttgttttgatagagcagttctgaaacacactttttgtaaaatctgcaagaggatatttggatagctttgaggatttcgttggaaacgggaatgtcttcatgtaaactctacacagaagcattctcagaaactgctttgggatgtttcaattgaagtcccagtgttgaacattcccattcatagagcaggtttgaaacactctttttgtactatctggaagtggacatttggagcgctttcaggtctacggtgaaaaaggagatatcttccaataaaaactagatagaagcaatgtcagaacttttttcatgatgtatctactcagcaaacagagttgaacctttcttttgagggagcagttttgaaacactatttttgtggaatatgcaagtgggtattaggccagcttggaggatttcgttggaaacgggaatacgtataaaaagcagacagcagcattgtcagaaactactttgtgatgtttgcattcaagtcacagaattgaacactccctttcacagagcaggtttgaaacactctttttgtagtgtctgtaagtgaacatttggattgctttcaggcctaaggtgaaaaaggaaatatcttcccataaaaactagacagaagcattctcagaaacttgtttgtgatgtgtgccctctactgacagagttgaacctttctttgcaaagagcagttttgaaacactctttttgtagaatctgcaagaggatatttggatagctttgaggatttcttgggaaacgggaatgtcttcagataaactccagacagaagcattctcagaaacttctttgggatgtttcaattgaagtcacagtgttgaacattccctttcacagagcaggtttgaaacactctttttgtagtgtctataagtgaacatttggcgtgctttcaggcctaacgtgaaaaaggaaatatcttcccataaaaactagacagaagcattctcagaaacttgttcgtgatgtgtgccctctactgacagagttgaacctttctttgcaaagagcagctttgaaacactctttttgtagaatctgcaagaggatatttggatagctttgaggatttcgttggaaacgggtatgtcttcagataaactctagacagaagcattctcagaaacttctttgggatgtttcaattgaagtcacagagtagaacattcccattcatagagcagatttgaaacactctttgtgtagtatctggaagtggacatttggagcgctttcaggcctatgttgaaaaaggaaatatcttcccataaaaactagacggaagcattctcagaaacttacttgtgatgtgtttgctcaactaacagaattgaaccatcgttttgaaggagcagttttgaaacactgttttcgtggaatctgcaagtggatatttggctagctttgaggatttcgttggaaacgggattacatataaaaaggagacagcagcattctcagaaacttctttgtgatgtttgcattcaagtcacagagttgaacattccctttcatagagcaggtttgaaacactctttttgtagtatctggatgtggacatttggatcgctttcaggcctatggtgaaaaaggaaatatcttcccatgaaaactagacagaagcattctcagaaacttattggtgatgtgtgccctcaactgacagtgttgaacctttgttttgatagagcagttctgaaacacaccttttgtaaaatctgcaagaggatatttggatagctttgaggatttcgttggaaacgggaatgtcttcatgtaaactctacacagaagcattctcagaaactgctttgggatgtttcaattgaagtcccagtgttgaacattccctttcatagagcaggtttgaaacactctttttgtactatctggaagtggacatttggagcgctttcaggtctacggtgaaaaaggagatatcttccaataaaaactagatagaagcaatgtcagaacttttttcatgatgtatctactcagcaaacagagttgaacctttcttttgagagagcagttttgaaacactctttttgtggaatatgcaagtgggtattaggccagcttggaggatttcgttggaaacgggaatacgtataaaaagcagacagcagcattgtcagaaactactttgtgatgtttgcattcaagtcacagaattgaacactccctttcacagagcaggtttgaaacactctttttgtagtgtctgtaagtgaacatatggattgctttcaggcctaaggtgaaaaaggaaatatcttcccataaaaactagacagaagcattctcagaaacttgtttgtgatgtgtgccctctactgacagagttgaacctttctttgcaaagaccagttttgaaacactctttttgtagaatctgcaagaggatatttggatagctttgaggatttcttgggaaacgggaatgtcttcagataaactctagacagaagcattctcagaaacttctttgggatgtttcaattgaagtcacagtgttgaacattccctttcacagagcaggtttcaaacactctttttgtagtgtctataagtgaacatttggcgtgctttcaggcctaacgtgaaaaaggaaatatcttcccataaaaactagacagaagcattctcagaaacttgttcgtgatgtgtgccctctactgacagagttgaacctttctttgcaaagagcagctttgaaacacactttttgtagaatctgcaagaggatatttggatagctttgaggatttcgttggaaacgggtatgtcttcagataaactctagacagaagcattctcagaaacttctttgggatgttgcattcaagtcacagagtagaacattcccattcatagagcagatttgaaacactctttttgtagtatctggaaatggacatttggagcgctttcaggcctatgttgaaaaaggaaatatcttcccataaaaactagacggaagcattctcagaaacttatttgtgatgtgtttgctcaactaacaggattgaaccatcgttttgaaggagcagttttgaaacactgttttcgtggaatctgcaagtggatatttggctagctttgaggatttcgttggaaacgggattacatatacaaaggagacagcagcattctcagaaacttctttgtgatgtctgcattcaagtcacagagttgagcattccctttcatagagcaggttggaaacactctttttgtagtatctggatgaggacatttggagcgctttcaggcgtatggtgaaaaaggaaatatcttcccgtaaaaactagacagaagcattctcagaaatttatttgtgaggtgtgccctcaactaaccgagttgaacctttcttttgatagagcagttttgaaacactctttttgtaaaatctgcaagaggatatttggatagctttgaggatttcgttgcaaacgggaatggcttcatataaactctagacagaagcattctcagaaacttcgttgggatgtttcgattgaagtcccagtgttgaacattcccttttatagagcaggttggaaacactctttctgcattccctggaagtggacatttggagcgctttcaggacgacggtgaaaatggaaatatcttccaagaaaatctagatagaagcaacgtcagaaacttttatgtgatggatctactcagctaacagagttgaacctttcttttgagagagcagttttgcaacactctttttgtggaatatgcaagtggatattagggcagctttgaggatttcgttggaaacgggaatacatgtaaaaagcagacagcagcattctcagaaacttctttgtgatgtttgcattgaagtcacagagttgaacattccctttgagagagcaggtttgaaacacgccttttgtcatatctggaagtgtccattcggagcgcattcaggcttgtgttgaaaaaggaaatatcctcccataaaaactagacagaagcattctcagaaacttatctgtgatgtatgtactcaactaacagaactaaaccatcgttttgaaggagcagttttgaaacactctttttgcggaatctgcaagtggatatttggctagctgggaggatttcgttggaaacgggattacatacaaaaagcagagagcagcattctcagaaacttatttgtgatgtgtgccctcaactgacagtgttgaacctttgttttgatagagcagttctgaaacacactttttgtaaaatctgcaagaggatatttggatagctttgaggatttcgttggaaacgggaatgtcttcatgtaaactctagacagaaagcattctcagaaactgctttgggatgtttcaattgaagtcccagtgttgaacattccctttcatagagcaggtttgaaacactctttttgtactatctggaagtggacatttggagcgctttcaggtctacggtgaaaaaggagatatcttccaataaaaactagatagaagcaatgtcagaacttttttcatgatgtatctactcagcaaacagagttgaacctttgttttgagagagcagttttgacactgtctttgtggaatatgcaagtgggtattaggccagcttggaggatttcgttggaaacgggaatacgtataaaaagcagacagcagcattgtcagaaactactttgtgatgtttgcattcaagtcacagaattgaacactccctttcacagagcaggtttgaaacactctttttgtagtgtctgtaagtgaacatttggattgctttcaggcctaaggtgaaaaaggaaatatcttcccataaaaactagacagaagcattctcagaaacttgtttgtgatgtgtgccctctactgacagagttgaacctttctttgcaaagagcagttttgaaacactctttttgtagaatctgcaagaggatatttggatagctttgaggatttcttgggaaacgggaatgtcttcagataaactctagacagaagcattctcagaaacttctttgggatgtttcaattgaagtcacagtgttgaacattccctttcacagagcaggtttgaaacactctttttgtagtgtctataagtgaacatttggcgtgctttcaggcgtaacgtgaaaaaggaaatatcttcccataaaaaccagacagaagcattctcagaaacttgttcgtgatgtgtgccctctactgacagagttgaacctttctttgcaaagagcagctttgaaacactctttttgtagaatctgcaagaggatatttggatagctttgaggatttcgttggaaacgggtatgtcttcagataaactctagacagaagcattctcagaaacttctttgggatgttgcattcaagtcacagagtagaacattcccattcatagagcagatttgaaacactctttttgtagtatctggaagtggacatttggagcgctttcaggcctatgttgaaaaaggaaatatgttcccataaaaactagacggaagcattctcagaaacttacttgtgatgtgtttgctcaactaacagaattgaaccatcgttttgaaggagcagttttgaaacactgttttcgtggaatctgcaagtggatatttggctagctttgaggatttcgttggaaacgggattacatataaaaaggagacagcagcattctcagaaacttctttgtgatgtttgcattcaagtcacagagttgaacattccctttcatagagcaggtttgaaacactctttttgtagtatctggatgtggacatttggatcgctttcaggcctatggtgaaaaaggaaatatcttcccatgaaaactagacagaagcattctcagaaacttattggtgatgtgtgccctcaactgacagtgttgaacctttgttttgatagagcagttctgaaacacactttttgtaaaatctgcaagaggatatttggatagctttgaggatttcgttggaaacgggaatgtcttcatgtaaactctagacagaagcattctcagaaactgctttgggatgtttcaattgaagtcccagtgttgaacattcccattcatagagcaggtttgaaacactctttttgtactatctggaagtggacatttggagcgctttcaggtctacggtgaaaaaggagatatcttccaataaaaactagatagaagcaatgtcagaacttttttcatgatgtatctactcagctaacagagttgaacctttcttttgagagagcagttttgaaacactctttttgtggaatatgcaagtgggtattaggccagcttggaggatttcgttggaaacgggaatacgtataaaaagacgacagcagcattgtcagaaactactttgtgatgtttgcattcaagtcacagaattgaacactccctttcacagagcaggtttgaaacactctttttgtagtgtctgtaagtgaacatttggattgctttcaggcctaaggtgaaaaaggaaatatcttcccataaaaactagacagaagcattctcagaaacttgtttgtgatgtgtgccctctactgacagagttgaacctttctttgcaaagagcagttttgaaacactctttttgtagaatctgcaagaggatatttggatagctttgaggatttcttgggaaacgggaatgtcttcagataaactctagacagaagcattctcagaaacttctttgggatgtttcaattgaagtcacagtgttgaacattccctttcacagagcaggtttgaaacactctttttgtagtgtctataagtgaacatttggcgtgctttcaggcctaacgtgaaaaaggaaatatcttcccataaaaactagacagaagcattctcagaaacttgtttgtgatgtgtgccctctactgacagagttgaacctttctttgcaaagagcagctttgaaacactctttttgtagaatctgcaagaggatatttggatagctttgaggattttgttggaaacgggtatgtcttcacataaactctagacagaagcattctcagaaacttctttgggatgttgcattcaagtcacagagtagaacattcccattcatagagcagatttgaaacactctttttgtagtatctggaagtggacatttggagcgctttcaggcctatgttgagaaacgaaatatcttcccataaaaactagacggaagcattctcagaaacttatttgtgatgtgtttgctcaactaacaggattgaaccatcgttttgaaggagcagttttgaaacactgttttcgtggaatctgcaagtggatatttggctagctttgaggatttcgttggaaacgggattacatataaaaaggagacagcagcattctcagaaacttctttgtgatgtctgcattcaagtcacagagttgagcattccctttcatagagcaggttgtaaacactctttttgtagtatctggatgaggacatttggagcgctttcaggcgtatggtgaaaaaggaaatatcttcccgtaaaaactagacagaagcattctcagaaatttatttgtgatgtgtgccctcaactaacagagttgaacctttcttttgatagagcagttttgaaacactctttttgtaaaatctgcaagaggatatttggatagctttgaggatttcgttgcaaacgggaatggcttcatataaactctagacagaagcattctcagaaacttcgttgggatgtttcgattgaagtcccagtgttgaacattcccttttatagagcaggttggaaacactctttctgcattccctggaagtgtacatttggagcgctttcaggacgacggtgaaaatggaaatatcttccaagaaaatctagatagaagcaacgtcagaaacttttctgtgatggatctactcagctaacagagttgaacctttcttttgagagagcagttttgcaacactctttttgtggaatatgcaagtggatattagggcagctttgaggatttcgttggaaacgggaatacatgtaaaaagcagacagcagcattctcagaaacttctttgtgatgtttgcattgaagtcacagagttgaacattccctttgagagagcaggtttgaaacacgccttttgtcatatctggaagtgtccattcggagcgcattcaggcttgtgttgaaaaaggaaatatcctcccataaaaactagacagaagcattctcagaaacttatctgtgatgtatgtactcaactaacagaactaaaccatcgttttgaaggagcagttttgaaacactctttttgcggaatctgcaagtggatatttggctagctgggaggatttcgttggaaacgggattacatacaaaaagcagacagcagcattctcagaaacttatttgtgatgtgtgccctcaactgacagtgttgaacctttgttttgatagagcagttctgaaacacactttttgtaaaatctgcaagaggatatttggatagctttgaggatttcgttggaaacgggaatgtcttcatgtaaactctagacagaagcattctcagaaactgctttgggatgtttcaattgaagtcccagtgttgaacattccctttaatagagcaggtttgaaacactctttttgtactatctggaagtggacatttggagcgctttcaggtctacggtgaaaaaggagatatcttccaataaaaactagatagaaagcaatgtcagaacttttttcatgatgtatctactcagctaacagagttgaacctttcttttgagagagcagttttgaaacactctttttgtggaatatgcaagtgggtattaggccagcttggaggatttcgttggaaacgggaatacgtataaaaagcagacagcagcattgtcagaaactactttgtgatgtttgcattcaagtcacagaattgaacactccctttcacagagcaggtttgaaacactctttttgtagtgtctgtaagtgaacatatggattgctttcaggcctaaggtgaaaaaggaaatatcttcccataaaaactagacagaagcattctcagaaacttgtttgtgatgtgtgccctctactgacagagttgaacctttctttgcaaagaccagttttgaaacactctttttgtagaatctgcaagaggatatttggatagctttgaggatttcttgggaaacgggaatgtcttcagataaactctagacagaagcattctcagcaaacttctttgggatgtttcaattgaagtcacagtgttgaacattccctttcacagagcaggtttgaaacactctttttgtagtgtctataattgaacatttggcgtgctttcaggcctaacgtgaaaaaggaaatatcttcccataaaaactagacagaagcattctcagaaacttggtttgtgatgtgtgccctctactgacagagttgaacctttctttgcaaagagcagctttgaaacactctttttgtagaatctgcaagaggatatttggatagctttgaggatttcgttggaaacgggtatgtcttcagataaactctagacagaagcattctcagaaacttctttgggatgttgcattcaagtcacagagtagaacattcccattcatagagcagatttgaaacactctttttgtagtatctggaagtggacatttggagcgctttcaggcctatgttgaaaaaggaaatatcttcccataaaaactagacggaagcattctcagaaacttatttgtgatgtgtttgctcaactaacaggattgaaccatcgttttgaaggagcagttttgaaacactgttttcgtggaatctgcaagtggatatttggctagctttgaggatttcgttggaaacgggattacatataaaaaggagacagccagcattctcagaaacttctttgtgatgtctgcattcaattcacagagttgagcattccctttcatagagcaggttggaaacactctttttgtagtatctggatgaggacatttggagcgctttcaggcctatggtgaaaaaggaaatatcttcccgtaaaaactagacagagcattctcagaagtttatttctgatgtgtgccctcaactaacagagttgaacctttcttttgatagagcagttttgaaacactctttttgtaaaatctgcaagaggatatttggatagctttgaggatttcgttgcaaacgggaatggcttcatataaactctagacagaagcattctcagaaacttcgttgggatgtttcgattgaagtcccagtgttgaacattcccttttatagagcaggttggaaacactctttctgcattccctggaagtggacatttggagcgctttcaggacgacggtgaaaatggaaatatcttccaagaaaatctagatagaagcaacgtcagaaacttttctgtgatggatctactcagctaacagagttgaacctttcttttgagagagcagttttgcaacactctttttgtggaatatgcaagtggatattagggcagctttgaggatttcgttggaaacgggaatacatgtaaaaagcagacagcagcattctcagaaacttctttgtgatgtttgcattgaagtcacagagttgaacattccctttgagagagcaggtttgaaacacgccttttgtcatatctggaagtgtccattcggagcgcattcaggcttgtgttgaaaaaggaaatatcctcccataaaaactagacagaagcattctcagaaacttatctgtgatgtatgtactcaactaacagaactaaaccatcgttttgaaggagcagttttgaaacactctttttgcggaatctgcaagtggatatttggctagctgggaggatttcgttggaaacgggattacatacaaaaagcagacagcagcattctcagaaacttatttgtgatgtgtgccctcaactgacagtgttgaacctttgttttgatagagcagttctgaaacacactttttgtaaaatctgcaagaggatatttggatagctttgaggatttcgttggaaacgggaatgtcttcatgtaaactctagacagaagcattctcagaaactgctttgggatgtttcaattgaagtcccagtgttgaacattccctttcatagagcaggtttgaaacactctttttgtactatctggaagtggacatttggagcgctttcaggtctacggtgaaaaaggagatatcttccaataaaaactagatagaagcaatgtcagaacttttttcatgatgtatctactcagcaaacagagttgaacctttcttttgagagagcagttttgacacagtctttgtggaatatgcaagtgggtattaggccagcttggaggatttcgttggaaacgggaatacgtataaaaagcagacagcagcattgtcagaaactactttgtgatgtttgcattcaagtcacagaattgaacactccctttcacagagcaggtttgaaacactctttttgtagtgtctataagtgaacatttggcgtgctttcaggcctaacgtgaaaaaggaaatatcttcccataaaaactagacagaagcattctcagaaacttgtttgtgatgtgtgccctctactgacagagttgaacctttctttgcaaagagcagttttgaaacactctttttgtagaatctgcaagaggatatttggatagctttgaggatttcttgggaaacgggaatgtcttcagataaactctagacagaagcattctcagaaacttcttgggatatttcaattgaagtcacagtgttgaacattccctttcacagagcaggtttgaaacactctttttgtagtgtctataagtgaacatttggcgtgctttcaggcctaacgtgaaaaaggaaatatcttcccataaaaactagacagaagcattctcagaaacttgttcgtgatgtgtgccctctactgacagagttgaacctttctttgcaaagagcagctttgaaacactctttttgtagaatctgccagaggatatttggatagctttgaggatttcgttggaaacgggtatgtcttcagataaactctagacagaagcattctcagaaacttctttgggatgttgcattcaagtcacagagtagaacattcccattcatagagcagatttgaaacactctttttgtagtatctggaagtggacatttggagcgctttcaggcctatgttgaaaaaggaaatatcttcccataaaaactagacggaagcattctcagaaacttatttgtgatgtgtttgctcaactaacaggattgaaccatcgttttgaaggagcagttttgaaacactgttttcgtggaatctgcaagtggatatttggctagctttgaggatttcgttggaaacgggattacatataaaaaggagacagcagcattctcagaaacttctttgtgatgtctgcattcaattcacagagttgagcattccctttcatagagcaggttggaaacactctttttgtagtatctggatgaggacatttggagcgctttcaggcgtatggtgaaaaaggaaatatcttcccgtaaaaactagacagaagcattctcagaaatttatttgtgatgtgtgccctcaactaacagagttgaacctttcttttgatagagcagttttgaaacactctttttgtaaaatctgcaagaggatatttggatagctttgaggatttcgttgcaaacgggaatggcttcatataaactctagacagaagcattctcagaaacttcgttgggatgtttcgattgaagtcccagtgttgaacattcccttttatagagcaggttggaaacactctttctgcattccctggaagtggacatttggagcgctttcaggacgacggtgaaaatggaaatatcttccaagaaaatctagatagaagcaatgtcagaaacttttatgtgatggatctactcagctaacagagttgaacctttcttttgagagagcagttttgcaacactctttttgtggaatatgcaagtggatattagggcagctttgaggatttcgttggaaacgggaatacatgtaaaaagcagacagcagcattctcagaaacttctttgtgatgtttgcattgaagtcacagagttgaacattccctttgagagagcaggtttgaaacacgccttttgtcatatctggaagtgtccattcggagcgcattcaggcttgtgttgaaaaaggaaatatcctcccataaaaactagacagaagcattctcagaaacttatctgtgatgtatgtactcaactaacagaactaaaccatcgttttgaaggagcagttttgaaacactctttttgcggaatctgcaagtggatatttggctagctgggaggatttcgttggaaacgggattacatacaaaaagcagacagcagcattctcagaaacttatttgtgatgtgtgccctcaactgacaagtgttgaacctttgttttgatagagcagttctgaaacacactttttgtaaaatctgcaagaggatatttggatagctttgaggatttcgttggaaacgggaatgtcttcatgtaaactctagacagaagcattctcagaaactgctttgggatgtttcaattgaagtcccagtgttgaacattccctttcatagagcaggtttgaaaccctctttttgtactatctggaagtggacatttggagcgctttcaggtctacggtgaaaaaggagatatcttccaataaaaactagatagaagcaatgtcagaacttttttcatgatgtatctactcagcaaacagagttgaacctttcttttgagagagcagttttgaaacactccttttgtggaatatgcaagtgggtattaggccagcttggaggatttcgttggaaacgggaatacgtataaaaagcagacagcagcattgtcagaaactactttgtgatgtttgcattcaagtcacagaattgaacactccctttcacagagcaggtttgaaacactctttttgtagtgtctgtaagtgaacatatggattgctttcaggcctaaggtgaaaaaggaaatatcttcccataaaaactagacagaagcattctcagaaacttgtttgtgatgtgtgccctctactgacagagttgaacctttctttgcaaagaccagttttgaaacactctttttgtagaatctgcaagaggatatttggatagctttgaggatttcttgggaaacgggaatgtcttcagataaactctagacagaagcattctcagaaacttctttgggatgtttcaattgaagtcacagtgttgaacattccctttcacagagcaggtttgaaacactctttttgtagtgtctataattgaacatttggcgtgctttcaggcctaacgtgaaaaaggaaatatcttcccataaaaactagacagaagcattctcagaaacttgttcgtgatgtgtgccctctactgacagagttgaacctttctttgcaaagagcagctttgaaacacactttttgtagaatctgcaagaggatatttggatagcttggaggatttcgttggaaacgggtatgtcttcagataaactctagacagaagcattctcagaaacttctttgggatgttgcattcaagtcacagagtagaacattcccattcatagagcagatttgaaacactctttttgtagtatctggaaatggacatttggagcgctttcaggcctatgttgaaaaaggaaatatcttcccataaaaactagacggaagcattctcagaaacttatttgtgatgtgtttgctcaactaacaggattgaaccatcgttttgaaggagcagttttgaaacactgttttcgtggaatctgcaagtggatatttggctagctttgaggatttcgttggaaacgggattacatataaaaaggagacagcagcattctcagaaacttctttgtgatgtttgcattcaagtcacagagttgaacattccctttcatagagcaggtttgaaacactctttttgtagtatctggatgtggacatttggatcgctttcaggcctatggtgaaaaaggaaatatcttcccatgaaaactagacagaagcattctcagaaacttatttgtgatgtgtgccctcaactgacagtgttgaacctttgttttgatagagcagttctgaaacacactttttgtaaaatctgcaagaggatatttggatagctttgaggatttcgttggaaacgggaatgtcttcatgtaaactctagacagaagcattctcagaaactgctttgggatgtttcaattgaagtcccagtgttgaacattcccattcatagagcaggtttgaagcactctttttgtactatctggaagtggacatttggagcgctttcaggtctacggtgaaaaaggagatatcttccaataaaaactagatagaagcaatgtcagaacttttttcatgatgtatctactcagcaaacagagttgaacctttcttttgagagagcagttttgaaacactctttttgtggaatatgcaagtgggtattaggccagcttggaggatttcgttggaaacgggaatacgtataaaaagcagacagcagcattgtcagaaactactttgtgatgtttgcattcaagtcacagaattgaacactccctttcacagagcaggtttgaaacactctttttgtagtgtctgtaagtgaacatttggattgctttcaggcctaaggtgaaaaaggaaatgtcttcccataaaaactagacagaagcattctcagaaacttgtttgtgatgtgtgccctctactgacagagttgaacctttctttgcaaagagcagttttgaaacactctttttgtagaatctgcaagaggatatttggatagctttgaggatttcttgggaaacgggaatgtcttcagataaactctagacagaagcattctcagaaacttctttgggatgtttcaattgaagtcacagtgttgaacattccctttcacagagcaggtttgaaacactctttttgtagtgtctataagtgaacatttggcgtgctttcaggcctaacgtgaaaaaggaaatatcttcccataaaaactagacagaagcattctcagacacttgttcgtgatgtgtgccctctactgacagagttgaacctttctttgcaaagagcagctttgaaacactctttttgtagaatctgcaagaggatatttggatagctttgaggatttcgttggaaacgggtatgtcttcagataaactctagacagaagcattctcagaaacttctttgggatgttgcattcaagtcacagagtagaacattcccattcatagagcagatttgaaacactctttttgtagtatctggaagtggacatttggagcgctttcaggcctatgttgaaaaaggatatatcttcccataaaaactagacggaagcattctcagaaacttacttgtgatgtgtttgctcaactaacagaattgaaccatcgttttaaaggagcagttttgaaacactgttttcgtggaatctgcaagtggatatttggctagctttgaggatttcgttggaaacgggattacatataaaaaggagacagcagcattctcagaaacttctttgtgatgtctgcattcaagtcacagagttgagcattccctttcatagagcaggttggaaacactctttttgtagtatctggatgaggacatttggagcgctttcaggcgtatggtgaaaaaggaaatatcttcccgtaaaaactagacagaagcattctcagaaatttatttgtgatgtgtgccctcaactaacagagttgaacctttcttttgatagagcagttttgaaacactctttttgtaaaatctgcaagaggatatttggatagctttgaggatttcgttgcaaacgggaatggcttcatataaactctagacagaagcattctcagaaacttcgttgggatgtttcgattgaagtcccagtgttgaacattcccttttatagagcaggttggaaacactctttctgcattccctggaagtggacatttggagcgctttcaggacgacggtgaaaatggaaatatcttccaagaaaatctagatagaagcaatgtcagaaacttttatgtgatggatctactcagctaacagagttgaacctttcttttgagagagcagttttgcaacactctttttgtggaatatgcaagtggatattagggcagctttgaggatttcgttggaaacgggaatacatgtaaaaagcagacagcagcattctcagaaacttctttgtgatgtttgcattgaagtcacagagttgaacattccctttgagagagcaggtttgaaacacgccttttgtcatatctggaagtgtccattcggagcgcattcaggcttgtgttgaaaaaggaaatatcctcccataaaaactagacagaagcattctcagaaacttatctgtgatgtatgtactcaactaacagaactaaaccatcgttttgaaggagcagttttgaaacactctttttgcggaatctgcaagtggatatttggctagctgggaggatttcgttggaaacgggattacatacaaaaagcagacagcagcattctcagaaacttatttgtgatgtgtgccctcaactgacagtgttgaacctttgttttgatagagcagttctgaaacacactttttgtaaaatctgcaagaggatatttggatagctttgaggatttcgttggaaacgggaatgtcttcatgtaaactctagacagaagcattctcagaaactgctttgggatgtttcaattgaagtcccagtgttgaacattccctttcatagagcaggtttgaaacactctttttgtactatctggaagtggacatttggagcgctttcaggtctacggtgaaaaaggagatatcttccaataaaaactagatagaagcaatgtcagaacttttttcatgatgtatctactcagcaaacagagttgaacctttcttttgagagagcagttttgaaacactctttttgtggaatatgcaagtgggtattaggccagcttggaggatttcgttggaaacgggaatacgtataaaaagcagacagcagcattgtcagaaactactttgtgatgtttgcattcaagtcacagaactgaacactccctttcacagagcaggtttgaaacactctttttgtagtgtctgtaagtgaacatttggattgctttcaggcctaaggtgaaaaaggaaatatcttcccataaaaactagacagaagcattctcagaaacttgtttgtgatgtgtgccctctactgacagagttgaacctttctttgcaaagagcagttttgaaacactctttttgtagaatctgcaagaggatatttggatagctttgaggatttcttgggaaacgggaatgtcttcagataaactctagacagaagcattctcagaaacttctttgggatgtttcaattgaagtcacagtgttgaacattccctttcacagagcaggtttgaaacactctttttgtagtgtctataagtgaacatttggcgtgctttcaggcgtaacgtgaaaaaggaaatatcttcccataaaaaccagacagaagcattctcagaaacttgttcgtgatgtgtgccctctactgacagagttgaacctttctttgcaaagagcagctttgaaacactctttttgtagaatctgcaagaggatatttggatagctttgaggatttcgttggaaacgggtatgtcttcagataaactctagacagaagcattctcagaaacttctttgggatgttgcattcaagtcacagagtagaacattcccattcatagagcagatttgaaacactctttttgtagtatctggaagtggacatttggagcgctttcaggcctatgttgaaaaaggaaatatcttcccataaaaactagacggaagcattctcagaaacttatttgtgatgtgtttgctcaactaacaggattgaaccatcgttttgaaggagcagttttgaaacactgttttcgtggaatctgcaagtggatatttggctagctttgaggatttcgttggaaacgggattacatatacaaaggagacagcagcattctcagaaacttctttgtgatgtctgcattcaattcacagagttgagcattccctttcatagagcaggttggaaacactctttttgtagtatctggatgaggacatttggagcgctttcaggcgtatggtgaaaaaggaaatatcttcccgtaaaaactagacagaagcattctcagaagtttatttgtgatgtgtgccctcaactaacagagttgaacctttcttttgatagagcagttttgaaacactctttttgtaatatctgcaagaggatatttggatagctttgaggatttcgttgcaaacgggaatcgcttcatataaactctagacagaagcattctcagaaacttcgttgggatgtttcgattgaagtcccagtgttgaacattcccttttatagagcaggttggaaacactctttctgcattccctggaagtggacatttggagcgctttcaggacgacggtgaaaatggaaatatcttccaagaaaatctagatagaagcaatgtcagaaacttttatgtgatggatctactcagctaacagagttgaacctttcttttgagagagcagttttgcaacactctttttgtggaatatgcaagtggatattagggcagctttgaggatttcgttggaaacgggaatacatgtaaaaagcagacagcagcattctcagaaacttctttgtgatgtttgcattgaagtcacagagttgaacattccctttgagagagcaggtttgaaacacgccttttgtcatatctggaagtgtccattcggagcgcattcaggcttgtgttgaaaaaggaaatatcctcccataaaaactagacagaagcattctcagaaacttatctgtgatgtatgtactcaactaacagaactaaaccatcgttttgaaggagcagttttgaaacactctttttgcggaatctgcaagtggatatttggctagctgggaggatttcgttggaaacgggattacatacaaaaagcagacagcagcattctcagaaacttatttgtgatgtgtgccctcaactgacagtgttgaacctttgttttgatagagcagttctgaaacacactttttgtaaaatctgcaagaggatatttggatagctttgaggatttcgttggaaacgggaatgtcttcatgtaaactctacacagaagcattctcagaaactgctttgggatgtttcaattgaagtcccagtgttgaacattccctttcatagagcaggtttgaaacactctttttgtactatctggaagtggacatttggagcgctttcaggtctacggtgaaaaaggagatatcttccaataaaaactagatagaagcaatgtcagaacttttttcatgatgtatctacacagcaaacagagttgaacctttcttttgagagagcagttttgaaacactctttttgtggaatatgcaagtgggtattaggccagcttggaggatttcgttggaaacgggaatacgtataaaaagcagacagcagcattgtcagaaacttctttgtgatgtttgcattcaagtcacagagttgaacactccctttcacagagcaggtttgaaacactctttttgtagtgtctgtaagtgaacatatggattgctttcaggcctaaggtgaaaaaggaaatatcttcccataaaaactagacagaaagcattctcagaaacttgtttgtgatgtgtgccctctactgacagagttgaacctttctttgcaaagagcagttttgaaacactctttttgtagaatctgcaagaggatatttggatagctttgaggatttcttgggaaacgggaatgtcttcagataaactctagacagaagcattctcagaaacttctttgggatgtttcaattgaagtcacagtgttgaacattccctttcacagagcaggtttgaaacactctttttgtagtgtctataagtgaacatttggcgtgctttcaggcctaacgtgaaaaaggaaatatcttcccataaaaactagacagaagcattctcagaaacttgttcgtgatgtgtgccctctactgacagagttgaacctttctttgcaaagagcagctttgaaacacactttttgtagaatctgcaagaggatatttggatagctttgaggatttcgttggaaacgggtatgtcttcagatatactctagacagaagcattctcagaaacttctttgggatgttgcattcaagtcacagagtagaacattcccattcatagagcagatttgaaacactctttttgtagtatctggaagtggacatttggagcgctttcaggcctatgttgaaaaaggaaatatcttcccataaaaactagacggaagcattctcagaaacttatttgtgatgtgtttgctcaactaacaggattgaaccatcgttttgaaggagcagttttgaaacactgttttcgtggaatctgcaagtggatatttggctagctttgaggatttcgttggaaatgggattacatatacaaaggagacagcagcattctcagaaacttctttgtgatgtctgcattcaagtcacagagttgagcattccctttcatagagcaggttggaaacactctttttgtagtatctggatgaggacatttggagcgctttctggcctatggtgaaaaaggaaatatcttcctgtaaaaactagacagaagattctcagaaatttatttgtgatgtgtgccctcaactaacagagttgaacctttcttttgatagagcagttttgaaacactctttttgtaaaatctgcaagaggatatttggatagctttgaggatttcgttgcaaacgggaatggcttcatataaactctagacagaagcattctcagaaacttcgttgggatgtttcgattgaagtcccagtgttgaacattcccttttatagagcaggttggaaacactctttctgcattccctggaagtggacatttggagcgctttcaggacgacggtgaaaatggaaatatcttccaagaaaatctagatagaagcaatgtcagaaacttttatgtgatggatctactcagctaacagagttgaacctttcttttgagagagcagttttgcaacactctttttgtggaatatgcaagtggatattagggcagctttgaggatttcgttggaaacgggaatacatgtaaaaagcagacagcagcattctcagaaacttctttgtgatgtttgcattgaagtcacagagttgaacattccctttgagagagcaggtttgaaacacgccttttgtcatatctggaagtgtccattcggagcgcattcaggcttgtgttgaaaaaggaaatatcctcccataaaaactagacagaagcattctcagaaacttatttgtgatgtatgtactcaactaacagaactaaaccatcgttttgaaggagcagttttgaaacactctttttgcggaatctgcaagtggatatttggctagctgggaggatttcgttggaaacgggattacatacaaaaagcagacagcagcattctcagaaacttatttgtgatgtgtgccctcaactgacagtgttgaacctttgttttgatagagcagttctgaaacacactttttgtaaaatctgcaagaggatatttggatagctttgaggatttcgttggaaacgggaatgtcttcatgtaaactctacacagaagcattctcagaaactgctttgggatgtttcaattgaagtcccagtgttgaacattcccattcatagagcaggtttgaaacactctttttgtactatctggaagtggacatttggagcgctttcaggtctacggtgaaaaaggagatatcttccaataaaaactagatagaagcaatgtcagaacttttttcatgatgtatctactcagctaacagagttgaacctttcttttgagagagcagttttgaaacactctttgtgtggaatatgcaagtgggtattaggccagcttggaggatttcgttggaaacgggaatacgtataaaaagcagacagcagcattgtcagaaactactttgtgatgtttgcattcaagtcacagaattgaacactccctttcacagagcaggtttgaaacactctttttgtagtgtctgtaagtgaacatatggattgctttcaggcctaaggtgaaaaaggaaatatcttcccataaaaactagacagaagcattctcagaaacttgtttgtgatgtgtgccctctactgacagagttgaacctttctttgcaaagagcagttttgaaacactctttttgtagaatctgcaagaggatatttggatagctttgaggatttcttgggaaacgggaatgtcttcagataaactctagacagaagcattctcagaaacttctttgggatgtttcaattgaagtcacagtgttgaacattccctttcacagagcaggtttgaaacactctttttgtagtgtctataagtgaacatttggcgtgctttcaggcctaacgtgaaaaaggaaatatcttcccataaaaactagacagaaagcattctcagaaacttgttcttgatgtgtcccctctactgacagagttgaacctttctttgcaaagagcagctttgaaacactctttttgtagaatctgcaagaggatatttggatagcttggaggatttcgttggaaacgggtatgtcttcagataaactctagacagaagcattctcagaaacttctttgggatgttgcattcaagtcacagagtagaacattcccattcatagagcagatttgaaacactctttttgtagtatctggaagtggacatttggagcgctttcaggcctatgttgaaaaaggaaatatcttcccataaaaactagacggaagcattctcagaaacttacttgtgatgtgtttgctcaactaacagaattgaaccatcgttttgaaggagcagttttgaaacactgttttcgtggaatctgcaagtggatatttggctagctttgaggatttcgttggaaacgggattacatataaaaaggagacagcagcattatcagaaacttctttgtgatgattgcattcaagtcacagagttgaacattcgctttcatacagcaggtttgaaacactctttttgtagtatctggaagtggacatttggagcgctttgtggcctatggtgaaaaaggaaatatcttcccataaaaactagatagaagcattctcagaaatttatttgtgatgtgtgccctcaactaacagagttgaacctttcttttgatagagcagttttgaaacactctttttgtaaaatctgcaagaggatatttggatagctttgaggatttcattgcaaacgggaatggcttcatataaactctagacagaagcattctcagaaacttcgttgggatgtttcgattgaagtcccagtgttgaacattcccttttatagagcaggttggaaacactctttctgcattccctggaagtggacatttggagcgctttcaggacgacggtgaaaatggaaatatcttccaagaaaatctagatagaagcaatgtcagaaacttttatgtgatggatctactcagctaacagagttgaagctttcttttgagagagcagttttgcaacactctttttgtggaatatgcaagtggatattagggcagctttgaggatttcgttggaaacgggaatacatgtaaaaagcagacagcagcattctcagaaacttctttgtgatgtttgcattgaagtcacagagttgaacattccctttgagagagcaggtttgaaacacgccttttgtcatatctggaagtgtccattcggagcgcattcaggcttgtgttgaaaaaggaaatatcctcccataaaaactagacagaagcattctcagaaacttatctgtgatgtatgtactcaactaacagaactaaaccatcgttttgaaggagcagttttgaaacactctttttgcggaatctgcaagtggatatttggctagctgggaggatttcgttggaaacgggattacatacaaaaagcagacagcagcattctcagaaacttatttgtgatgtgtgccctcaactgacagtgttgaacatttgttttgatagagcagttctgaaacacactttttgtaaaatctgcaagaggatatttggatagctttgaggatttcgttggaaacgggaatgtcttcatgtaaactctacacagaagcattctcagaaactgctttgggatgtttcaattgaagtcccagtgttgaacattccctttcatagagcaggtttgaaacactctttttgtactatctggaagtggacatttggagcgctttcaggtctacggtgaaaaaggagatatcttccaataaaaactagatagaagcaatgtcagaacttttttcatgatgtatctactcagcaaacagagttgaacctttcttttgagagagcagttttgaaacactctttttgtggaatatgcaagtgggtattaggccagcttggaggatttcgttggaaacgggaatacgtataaaaagcagacagcagcattgtcagaaactactttgtgatgtttgcattcaagtcacagaactgaacactccctttcacagagcaggtttgaaacactctttttgtagtgtctgtaagtgaacatttggattgctttcaggcctaaggtgaaaaaggaaatatcttcccataaaaactagacagaagcattctcagaaacttgtttgtgatgtgtgccctctactgacagagttgaacctttctttgcaaagaccagttttgaaacactctttttgtagaatctgcaagaggatatttggatagctttgaggatttcttgggaaacgggaatgtcttcagataaactctagacagaagcattctcagaaacttctttgggatgtttcaattgaagtcacagtgttgaacattccctttcacagagcaggtttgaaacactctttttgtagtgtctataagtgaacatttggcgtgctttcaggcgtaacgtgaaaaaggaaatatcttcccataaaaactagacagaagcattctcagaaacttgttcttgatgtgtcccctctactgacagagttgaacctttctttgcaaagagcagctttgaaacactctttttgtagaatctgcaagaggatatttggatagcttggaggatttcgttggaaacgggtatgtcttcagataaactctagacagaagcattctcagaaacttctttgggatgttgcattcaagtcacagagtagaacattcccattcatagagcagatttgaaacactctttttgtagtatctggaagtggacatttggagcgctttcaggcctatgttgaaaaaggaaatatcttcccataaaaactagacggaagcattctcagaaacttatttgtgatgtgtttgctcaactaacaggattgaaccatcgttttgaaggagcagttttgaaacactgttttcgtggaatctgcaagtggatatttggctagctttgaggatttcgttggaaacgggattacatataaaaaggagacagcagcattctcagaaacttctttgtgatgtctgcattcaagtcacagagttgagcattccctttcatagagcaggttggaaacactctttttgtagtatctggatgaggacatttggagcgctttcaggcgtatggtgaaaaaggaaatatcttcccgtaaaaactagacagaagcattctcagaagtttatttgtgatgtgtgccctcaactaacagagttgaacctttcttttgatagagcagttttgaaacactctttttgtaaaatctgcaagaggatatttggatagctttgaggatttcgttgcaaacgggaatggcttcatataaactctagacagaaagcattctcagaaacttcgttgggatgtttcgattgaagtcccagtgttgaacattcccttttatagagcaggttggaaacactctttctgcattccctggaagtggacatttggagcgctttcaggacgacggtgaaaatggaaatatcttccaagaaaatctagatagaagcaatgtcagaaacttttatgtgatggatctactcagctaacagagttgaacctttcttttgagagagcagttttgcaacactccttttgtggaatatgcaagtggatattagggcagctttgaggatttcgttggaaacgggaatacatgtaaaaagcagacagcagcattctcagaaacttctttgtgatgtttgcattgaagtcacagagttgaacattccctttgagagagcaggtttgaaacacgccttttgtcatatctggaagtgtccattcggagcgcattcaggcttgtgttgaaaaaggaaatatcctcccataaaaactagacagaagcattctcagaaacttatctgtgatgtatgtactcaactaacagaactaaaccatcgttttgaaggagcagttttgaaacactctttttgcggaatctgcaagtggatatttggctagctgggaggatttcgttggaaacgggattacatacaaaaagcagacagcagcattctcagaaacttatttgtgatgtgtgccctcaactgacagtgttgaacctttgttttgatagagcagttctgaaacacactttttgtaaaatctgcaagaggatatttggatagctttgaggatttcgttggaaacgggaatgtcttcatgtaaactctagacagaagcattctcagaaactgctttgggatgtttcaattgaagtcccagtgttgaacattccctttcatagagcaggtttgaaacactctttttgtactatctggaagtggacatttggagcgctttcaggtctacggtgaaaaaggagatatcttccaataaaaactagatagaagcaatgtcagaacttttttcatgatgtatctactcagcaaacagagttgaacctttcttttgagggagcagttttgaaacactatttttgtggaatatgcaagtgggtattaggccagcttggaggatttcgttggaaacgggaatacgtataaaaagcagacagcagcattgtcagaaactactttgtgatgtttgcattcaagtcacagaattgaacactccctttcacagagcaggtttgaaacactctttttgtagtgtctgtaagtgaacatttggattgctttcaggcctaaggtgaaaaaggaaatatcttcccataaaaactagacagaagcattctcagaaacttgtttgtgatgtgtgccctctactgacagagttgaacctttctttgcaaagagcagttttgaaacactctttttgtagaatctgcaagaggatatttggatagctttgaggatttcttgggaaacgggaatgtcttcagataaactctagacagaagcattctcagaaacttctttgggatgtttcaattgaagtcacagtgttgaacattccctttcacagagcaggtttgaaacactctttttgtagtgtctataagtgaacatttggcgtgctttcaggcgtaacgtgaaaaaggaaatatcttcccataaaaaccagacagaagcattctcagaaacttgttcttgatgtgtcccctctactgacagagttgaacctttctttgcaaagagcagctttgaaacacactttttgtagaatctgcaagaggatatttggatagcttggaggatttcgttggaaacgggtatgtcttcagataaactctagacagaagcattctcagaaacttctttgggatgttgcattcaagtcacagagtagaacattcccattcatagagcagatttgaaacactctttttgtagtatctggaagtggacatttggagcgctttcaggcctatgttgaaaaaggaaatatcttcccataaaaactagacggaagcattctcagaaacttatttgtgatgtgtttgctcaactaacaggattgaaccatcgttttgaaggagcagttttgaaacactgttttcgtggaatctgcaagtggatatttggctagctttgaggatttcgttggaaacgggattacatataaaaaggagacagcagcattctcagaaacttctttgtgatgtctgcattcaattcacagagttgagcattccctttcatagatcaggttggaaacactctttttgtagtatctggatgtggacatttggatcgctttctggcctatggtgaaaaaggaaatatcttcccatgaaaactagacagaagcattctcagaagtttatttgtgatgtgtgccctcaactaacagagttgaacctttcttttgatagagcagttttgaaacactctttttgtaaaatatgcaagaggatatttggatagctttaaggatttcgttgcaaacgggaatggcttcatataaactctagacagaagcattctcagaaacttcgttgggatgtttcgattgaagtcccagtgttgaacattcccttttatagagcaggttggaaacactctttctgcattccctggaagtggacatttggagcgctttcaggacgacggtgaaaatggaaatatcttccaagaaaatctagatagaagcaatgtcagaaacttttatgtgatggatctactcagctaacagagttgaacctttcttttgagagagcagttttgcaacactctttttgtggaatatgcaagtggatattagggcagctttgaggatttcgttggaaacgggaatacatgtaaaaagcagacagcagcattctcagaaacttctttgtgatgtttgcattgaagtcacagagttgaacattccctttgagagagcaggtttgaaacacgccttttgtcatatctggaagtgtccattcggagcgcattcaggcttgtgttgaaaaaggaaatatcctcccataaaaactagacagaagcattctcagaaacttatctgtgatgtatgtactcaactaacagaactaaaccatcgttttgaaggagcagttttgaaacactctttttgcggaatctgcaagtggatatttggctagctgggaggatttcgttggaaacgggattacatacaaaaagcagacagcagcattctcagaaacttatttgtgatgtgtgccctcaactgacagtgttgaacctttgttttgatagagcagttctgaaacacactttttgtaaaatctgcaagaggatatttggatagctttgaggatttcgttggaaacgggaatgtcttcatgtaaactctagacagaagcattctcagaaactgctttgggatgtttcaattgaagtcccagtgttgaacattccctttcatagagcaggtttgaaacactctttttgtactatctggaagtggacatttggagcgctttcaggtctacggtgaaaaaggagatatcttccaataaaaactagatagaagcaatgtcagaacttttttcatgatgtatctactcagcaaacagagttgaacctttcttttgagagagcagttttgaaacactctttttgtggaatatgcaagtgggtattaggccagcttggaggatttcgttggaaacgggaatacgtataaaaagcagacagcagcattgtcagaaactactttgtgatgtttgcattcaagtcacagaattgaacactccctttcacagagcaggtttgaaacactctttttgtagtgtctgtaagtgaacatttggattgctttcaggcctatggtgaaaaaggtaatatcttcccataaaaactagacagaagcattctcagaaacttgttcatgatgtgtgccctctactgacagagttgaacctttctttgcaaagagcagctttgaaacactctttttgtagaatctgcaagaggatatttggatagctttgaggatttcgttggaaacgggtatgtcttcagataaactctagagagaagcattctcagaaacttctttgggatgttgcattcaagtcacagagtagaacattcccattcatagagcagatttgaaacactctttttgtagtatctggaagtggacatttggagcgctttcaggcctatgttgtaaaaggaaatatcttcccataaaaactagacggaagcattctcagaaacttatttgtgatgtgtttgctcaactaacaggattgaaccatcgttttgaaggagcagttttgaaacactgttttcgtggaatctgcaagtggatatttggctagctttgaggatttcgttggaaacgggattacatataaaaaggagacagcagcattctcagaaacttctttgtgatgtctgcattcaagtcacagagttgagcattccctttcatagagcaggttggaaacactctttttgtagtatctggatgaggacatttggagcgctttcaggcgtatggtgaaaaaggaaatatcttcccgtaaaaactagacagaagcattctcagaaatttatttgtgatgtgtgccgtcaactaacagagttgaacctttcttttgatagagcagttttgaaagactctttttgtaaaatctgcaagaggatatttggatagctttgaggatttcgttgcaaacgggaatggcttcatataaactctagacagaagcattctcagaaacttcgttgggatgtttcgattgaagtcccagtgttgaacattcccttttatagagcaggttggaaacactctttctgcattccctggaagtggacatttggagcgctttcaggacgacggtgaaaatggaaatatcttccaagcaaaatctagatagaagcaacgtcagaaacttttctgtgatggatctactcagctaacagagttgaacctttcttttgagagagcagttttgcaacactctttttgtggaatatgcaagtggatattagggcagctttgaggatttcgttggaaacgggaatacatgtaaaaagcagacagcagcattctcagaaacttctttgtgatgtttgcattgaagtcacagagttgaacattccctttgagagagcaggtttgaaacacgccttttgtcatatctggaagtgtccattcggagcgcattcaggcttgtgttgaaaaaggaaatatcctcccataaaaactagacagaagcattctcagaaacttatctgtgatgtatgtactcaactaacagaactaaaccatcgttttgaaggagcagttttgaaacactctttttgcggaatctgcaagtggatatttggctagctgggaggatttcgttggaaacgggattacatacaaaaagcagacagcagcattctcagaaacttatttgtgatgtgtgccctcaactgacagtgttgaacctttgttttgatagagcagttctgaaacacactttttgtaaaatctgcaagaggatatttggatagctttgaggatttcgttggaaacgggaatgtcttcatgtaaactctagacagaagcattctcagaaactgctttgggatgtttcaattgaagtcccagtgttgaacattccctttcatagagcaggtttgaaacactctttttgtactatctggaagtggacatttggagcgctttcaggtctacggtgaaaaaggagatatcttccaataaaaactagatagaagcaatgtcagaacttttttcatgatgtatctactcagcaaacagagttgaacctttcttttgagagagcagttttgaaacactctttttgtggaatatgcaagtgggtattaggccagcttggaggatttcgttggaaacgggaatacgtataaaaagcagacagcagcattgtcagaaactactttgtgatgtttgcattcaagtcacagaattgaacactccctttcacagagcaggtttgaaacactctttttgtagtgtctataagtgaacatttggcgtgctttcaggcctaacgtgaaaaaggaaatatcttcccataaaaactagacagaagcattctcagaaacttgtttgtgatgtgtgccctctactgacagagttgaacctttctttgcaaagagcagttttgaaacactctttttgtagaatctgcaagaggatatttggatagctttgaggatttcttgggaaacgggaatgtcttcagataaactctagacagaagcattctcagaaacttctttgggatgtttcaattgaagtcacagtgttgaacattccctttcacagagcaggtttgaaacactctttttgtagtgtctataagtgaacatttggcgtgctttcaggcctaacgtgaaaaaggaaatatcttcccataaaaactagacagaagcattctcagaaacttgttcttgatgtgtcccctctactgacagagttgaacctttctttgcaaagagcagctttgaaacactctttttgtagaatctgcaagaggatatttggatagcttggaggatttcgttggaaacgggtatgtcttcagataaactctagacagaagcattctcagaaacttctttgggatgttgcattcaagtcacagagtagaacattcccattcatagagcagatttgaaacactctttttgtagtatctggaagtggacatttggagcgctttcaggcctatgttgaaaaaggaaatatcttcccataaaaactagacggaagcattctcagaaacttatttgtgatgtgtttgctcaactaacaggattgaaccatcgttttgaaggagcagttttgaaacactgttttcgtggaatctgcaagtggttatttggctagctttgaggatttcgttggcaaacgggattacatatacaaaggagacagcagcattctcagaaacttctttgtgatgtctgcattcaattcacagagttgagcattccctttcttagagcaggttggaaacactctttttgtagtatctggatgaggacatttggagcgctttcaggcgtatggtgaaaaaggaaatatcttcccgtaaaaactagacagaagcattctcagaagtttatttgtgatgtgtgccctcaactaacagagttgaacctttcttttgatagagcagttttgaaacactctttttgtaaaatctgcaagaggatatttggatagctttgaggatttcgttgcaaacgggaatggcttcatataaactctagacagaagcattctcagaaacttcgttgggatgtttcgattgaagtcccagtgttgaacattcccttttatagagcaggttggaaacactctttctgcattccctggaagtggacatttggagcgctttcaggacgacggtgaaaatggaaatatcttccaagaaaatctagatagaagcaatgtcagaaacttttatgtgatggatctactcagctaacagagttgaacctttcttttgagagagcagttttgcaacactctttttgtggaatatgcaagtggatattaggacagctttgaggatttcgttggaaacgggaatacatgtaaaaagcagacagcagcattctcagaaacttctttgtgatgtttgcattgaagtcacagagttgaacattccctttgagagagcaggtttgaaacacgccttttgtcatatctggaagtgtccattcggagcgcattcaggcttgtgttgaaaaaggaaatatcctcccataaaaactagacagaagcattctcagaaacttatctgtgatgtatgtactcaactaacagaactaaaccatcgttttgaaggagcagttttgaaacactctttttgcggaatctgcaagtggatatttggctagctgggaggatttcgttggaaacgggattacatacaaaaagcagacagcagcattctcagaaacttatttgtgatgtgtgcactcaactgacagtgttgaacctttgttttgatagagcagttctgaaacacactttttgtaaaatctgcaagaggatatttggatagctttgaggatttcgttggaaacgggaatgtcttcatgtaaactctagacagaagcattctcagaaactgctttgggatgtttcaattgaagtcccagtgttgaacattcccattcatagagcaggtttgaaacactctttttgtactatctggaagtggacatttggagcgctttcaggtctacggtgaaaaaggagatatcttccaataaaaactagatagaagcaatgtcagaacttttttcatgatgtatctactcagcaaacagagttgaacctttcttttgagagagcagttttgaaacactctttttgtggaatatgcaagtgggtattaggccagcttggaggatttcgttggaaacgggaatacgtataaaaagcagacagcagcattgtcagaaactactttgtgatgtttgcattcaagtcacagaattgaacactccctttcacagagcaggtttgaaacactctttttgtagtgtctgtaagtgaacatttggattgctttcaggcctaaggtgaaaaaggaaatatcttcccataaaaactagacagaagcattctcagaaacttgtttgtgatgtgtgccctctactgacagagttgaacctttctttgcaaagagcagttttgaaacacactttttgtagaatctgcaagaggatatttggatagctttgaggatttcttgggaaacgggaatgtcttcagataaactctagaaagaagcattctcagaaacttctttgggatgtttcaattgaagtcacagtgttgaacattccctttcacagagcaggtttgaaacactctttttgtagtgtctataagtgaacatttggcgtgctttcaggcctaacgtgaaaaaggaaatatcttcccataaaaactagacagaagcattctcagaaacttgttcttgatgtgtcccctctactgacagagttgaacctttctttgcaaagagcagctttgaaacactctttttgtagaatctgcaagaggatatttggatagcttggaggatttcgttggaaacgggtatgtcttcagataaactctagacagaagcattctcagaaacttatttgggatgttgcattcaagtcacagagtagaacattcccattcatagagcagatttgaaacactctttttgtagtatctggaagtggacatttggagcgctttcaggcctatgttgaaaaaggaaatatcttcccataaaaactagacggaagcattctcagaaacttaattgtgatgtgtttgctcaactaacaggattgaaccatcgttttgaaggagcagttttgaaacactgttttcgtggaatctgcaagtggatatttggctagctttgaggatttcgttggaaacgggattacatataaaaaggagacagcagcattctcagaaacttctttgtgatgtctgcattcaattcacagagttgagcattccctttcatagagcaggttggaaacactctttttgtagtatctggatgtggacatttggatcgctttcaggcctatggtgaaaaaggaaatatcttcccatgaaaactagacagaagcattctcagaaatttatttgtgatgtgtgccctcaactaacagagttgaacctttcttttgatagagcagttttgaaacactctttttgtaaaatctgcaagaggatatttggatagctttgaggatttcgttgcaaacgggaatggcttcatataaactctagacagaagcattctcagaaacttcgttgggatgtttcgattgaagtcccagtgttgaacattcccttttatagagcaggttggaaacactctttctgcattccctggaagtggacatttggagcgctttcaggacgacggtgaaaatggaaatatcttccaagaaaatctagatagaagcaacgtcagaaacttttatgtgatggatctactcagctaacagagttgaacctttcttttgagagagcagttttgcaacactctttttgtggaatatgcaagtggatattagggcagctttgaggatttcgttggaaacgggaatacatgtaaaaagcagacagcagcattctcagaaacttctttgtgatgtttgcattgaagtcacagagttgaacattccctttgagagagcaggtttgaaacacgccttttgtcatatctggaagtgtccattcggagcgcattcaggcttgtgttgaaaaaggaaatatcctcccataaaaactagacagaagcattctcagaaacttatttgtgatgtatgtactcaactaacagaactaaaccatcgttttgaaggagcagttttgaaacactctttttgcggaatctgcaactggatatttggctagcttggaggatttcgttggaaacgggattacataaaaaagcagacagcagcattctcagaaacttatttgtgatgtgtgccctcaactgacagtgttgaacctttgttttgatagagcagttctgaaacacactttttgtaaaatctgcaagaggatatttggatagctttgaggatttcgttggaaacgggaatgtcttcatgtaaactctagacagaagcattctcagaaactgctttgggatgtttcaattgaagtcccagtgttgaacattccctttcatagagcaggtttgaaacactctttttgtactatctggaagtggacatttggagcgctttcaggtctacggtgaaaaaggagatatcttccaataaaaactagatagaagcaatgtcagaacttttttcatgatgtatctactcagcaaacagagttgaacctttcttttgagagagcagtttcgaaacactctttctgtggaatatgcaagtgggtattaggccagcttggaggatttcgttggaaacgggaatacgtataaaaagcagacagcagcattgtcagaaactactttgtgatgtttgcattcaagtcacagaattgaacactccctttcacagagcaggtttgaaacactctttttgtagtgtctgtaggtgaacatttggattgctttcaggcctaaggtgaaaaaggaaatatcttcccataaaaactagacagaagcattctcagaaacttgtttgtgatgtgtgccctctactgacagagttgaacctttctttgcaaagagcagttttgaaacactctttttgtagaatctgcaagaggatatttggatagctttgaggatttcttgggaaacgggaatgtcttcagataaactctagacagaagcattctcagaaacttctttgggatgtttcaattgaagtcacagtgttgaacattccctttcacagagcaggtttgaaacactctttttgtagtgtctataagtgaacatttggcgtgctttcaggcgtaacgtgaaaaaggaaatatcttcccataaaaactagacagaagcattctcagaaacttgttcatgatgtgtgccctctactgacagagttgaacctttctttgcaaagagcagctttgaaacactctttttgtagaatctgcaagaggatatttggatagctttgaggatttcgttggaaacgggtatgtcttcagataaactctagacagaagcattctcagaaacttctttgggatgttgcattcaagtcacagagtagaacattcccattcatagagcagatttgaaacactctttttgtagtatctggaagtggacatttggagcgctttcaggcctatgttgaaaaaggaaatatcttcccataaaaactagacggaagcattctcagaaacttaattgtgatgtgtttgctcaactaacaggattgaaccatcgttttgaaggagcagttttgaaacactgttttcgtggaatctgcaagtggatatttggctagctttgaggatttcgttggaaacgggattacatataaaaaggagacagcagcattctcagaaacttctttgtgatgtttgcattcaagtcacagagttgaacattccctttcatagagcaggtttgaaacactctttttgtagtatctggatgtggacatttggatcgctttcaagcctatggtgaaaaaggaaatatatcttcccatgaaaactagacagaagcattctcagaagtttatttgtgatgtgtgccctcaactaacagagttgaacctttcttttgatagagcagttttgaaacactctttttgtaaaatctgcaagaggatatttggatagctttgaggatttcgttgcaaacgggaatggcttcatataaactctagacagaagcattctcagaaacttcgttgggatgtttcgattgaagtcccagtgttgaacattcccttttatagagcaggttggaaacactctttctgcattccctggaagtggacatttggagcgctttcaggacgacggtgaaaatggaaatatcttccaagaaaatctagatagaagcaacgtcagaaacttttctgtgatggatctactcagctaacagagttgaacctttcttttgagagagcagttttgcaacactctttttgtggaatatgcaagtggatattagggcagctttgaggatttcgttggaaacgggaatacatgtaaaaagcagacagcagcattctcagaaacttctttgtgatgtttgcattgaagtcacagagttgaacattccctttgagagagcaggtttgaaacacgccttttgtcatatctggaagtgtccattcggagcgcattcaggcttgtgttgaaaaaggaaatatcctcccataaaaactagacagaagcattctcagaaacttatctgtgatgtatgtactcaactaacagaactaaaccatcgttttgaaggagcagttttgaaacactctttttgcggaatctgcaagtggatatttggctagctgggaggatttcgttggaaacgggattacatacaaaaagcagacagcagcattctcagaaacttatttgtgatgtgtgccctcaactgacagtgttgaacctttgttttgatagagcagttctgaaacacactttttgtaaaatctgcaagaggatatttggatagctttgaggatttcgttggaaacgggaatgtcttcatgtaaactctagacagaagcattctcagaaactgctttgggatgtttcaattgaagtcccagtgttgaacattcccattcatagagcaggtttgaaacactctttttgtactatctggaagtggacatttggagcgctttcaggtctacggtgaaaaaggagatatcttccaataaaaactagatagaagcaatgtcagaacttttttcatgatgtatctactcagcaaacagagttgaacctttcttttgagagagcagttttgaaacactctttttgtggaatatgcaagtgggtattaggccagcttggaggatttcgttggaaacgggaatacgtataaaaagcagacagcagcattgtcagaaactactttgtgatgtttgcattcaagtcacagaattgaacactccctttcacagagcaggtttgaaacactctttttgtagtgtctgtaagtgaacatttggattgctttcaggcctaaggtgaaaaaggaaatatcttcccataaaaactagacagaagcattctcagaaacttgtttgtgatgtgtgccctctactgacagagttgaacctttctttgcaaagagcagttttgaaacactctttttgtagaatctgcaagaggatatttggatagctttgaggatttcttgggaaacgggaatgtcttcagataaactctagacagaagcattctcagaaacttctttgggatgtttcaattgaagtcacagtgttgaacattccctttcacagagcaggtttgaaacactctttttgtagtgtctataagtgaacatttggcgtgctttcaggcctaacgtgaaaaaggaaatatcttcccataaaaactagacagaagcattctcagaaacttgttcgtgatgtgtgccctctactgacagagttgaacctttctttgcaaagagcagctttgaaacacactttttgtagaatctgcaagaggatatttggatagcttggaggatttcgttggaaacgggtatgtcttcagataaactctagacagaagcattctcagaaacttctttgggatgttgcatgcaagtcacagagtagaacattcccattcataaatcagatttgaaacactctttttgtagtatctggaagtggacatttggagcgctttcaggcctatgttgaaaaaggaaatatcttcccataaaaactagacggaagcattctcagaaacttatttgtgatgtgtttgctcaactaacaggattgaaccatcgttttgaaggagcagttttgaaacactgttttcgtggaatctgcaagtggatatttggctagctttgaggatttcgttggaaacgggattacatataaaaaggagacagcaacattctcagaaacttctttgtgatgtctgcattcaagtcacagagttgagcattccctttcatagagcaggttggaaacactctttttgtagtatctggatgaggacatttggagcgctttcaggcgtatggtgaaaaaggaaatatcttcccgtaaaaactagacagaagcattctcagaaacttatttgtgatgtgtgccctcaactaacagagttgaacctttcttttgatagagcagttttgaaacactctttttgtaaaatctgcaagaggatatttggatagctttgaggatttcgttggaaacgggaatgtcttcatgtaaactctagacagaagcattctcagaaacttcgttgggatgtttcgattgaagtcccagtgttgaacattcccttttatagagcaggttggaaacactctttctgcattccctggaagtggacatttggagcgctttcaggacgacggtgaaaatggaaatatcttccaagaaaatctagatagaagcaacgtcagaaacttttctgtgatggatctactcagctaacagagttgaacctttcttttgagagagcagttttgcaacactctttttgtggaatatgcaagtggatattagggcagctttgaggatttcgttggaaacgggaatacatgtaaaaagcagacagcagcattctcagaaacttctttgtgatgtttgcattgaagtcacagagttgaacattccctttgagagagcaggtttgaaacacgccttttgtcatatctggaagtgtccattcggagcgcattcaggcttgtgttgaaaaaggaaatatcctcccataaaaactagacagaagcattctcagaaacttatctgtgatgtatgtactcaactaacagaactaaaccatcgttttgaaggagcagttttgaaacactctttttgcagaatctgcaagtggatatttggctagctgggaggatttcgttggaaacgggattacatacaaaaagcagacagcagcattctcagaaacttctttgtgatgtttgcattcaagtcacagagttgaacattccctttcatagagcaggtttgaaacactctttttgtagtatctggatgtggacatttggatcgctttcaggcctatggtgaaaaaggaaatatcttcccatgaaaactagacagaagcattctcagaaacttatttgtgatgtgtgccctcaactgacagtgttgaacctttgttttgatagagcagttctgaaacacactttttgtaaaatctgcaagaggatatttggatagctttgaggatttcgttggaaacgggaatgtcttcatgtaaactctacacagaagcattctcagaaactgctttgggatgtttcaattgaagtcccagtgttgaacattccctttcatagagcaggtttgaaacactctttttgtactatctggaagtggacatttggagcgctttcaggtctacggtgaaaaaggagatatcttccaataaaaactagatagaagcaatgtcagaacttttttcatgatgtatctactcagcaaacagagttgaacctttcttttgagagagcagttttgaaacactctttttgtggaatatgcaagtgggtattaggccagcttggaggatttcgttggaaacgggaatacgtataaaaagcagacagcagcattgtcagaaactactttgtgatgtttgcattcaagtcacagaattgaacactccctttcacagagcaggtttgaaacactctttttgtagtgtctgtaagtgaacatttggattgatttcaggcctaaggtgaaaaaggaaatatcttcccataaaaactagacagaagcattctcagaaacttgtttgtgatgtgtgccctctactgacagagttgaacctttctttgcaaagagcagttttgaaacactctttttgtagaatctgcaagaggatatttggatagctttgaggatttcttgggaaacgggaatgtcttcagataaactctagacagaaagcattctgagaaacttctttgggatgtttcaattgaagtcacagtgttgaacattccctttcacagagcaggtttgaaacactctttttgtagtgtctataagtgaacatttggcgtgctttcaggcctaacgtgaaaaaggaaatatcttcccataaaaacgagacagaagcattctcagaaacttgttcgtgatgtgtgccctctactgacagagttgaacctttctttgcaaagagcagctttgaaacactctttttgtagaatctgcaagaggatatttggatagctttgaggatttcgttggaaacgggtatgtcttcagataaactctagacagaagcattctcagaaacttctttgggatgttgcattcaagtcacagagtagaacattcccattcatagagcagatttgaaacactctttttgtagtatctggaagtggacatttggagcgctttcaggcctatgttgaaaaaggaaatatcttcccataaaaactagacggaagcattctcagaaacttacttgtgatgtgtttgctcaactaacagaattgaaccatcgttttgaaggagcagttttgaaacactgttttcgtggaatctgcaagtggatatttggctagctttgaggatttcgttggaaacgggattacatataaaaaggagacagcagcattctcagaaacttctttgtgatgtctgcattcaattcacagagttgagcattccctttcatagagcaggttggaaacactctttttgtagtatctggatgaggacatttggagcgctttcaggcgtatggtgaaaaaggaaatatcttcccgtaaaaactagacagaagcattctcagaaatttatttgtgatgtgtgccctcaactaacagagttgaacctttcttttgatagagcagttttgaaacactctttttgtaaaatctgcaagaggatatttggatagctttgaggatttcgttgcaaacgggaatggcttcatataaactctagacagaagcattctcagaaacttcgttgggatgtttcgattgaagtcccagtgttgaacattcccttttatagagcaggttggaaacactctttctgcattccctggaagtggacatttggagcgctttcaggacgacggtgaaaatggaaatatcttccaagaaaatctagatagaagcaacgtcagaaacttttatgtgatggatctactcagctaacagagttgaacctttcttttgagagagcagttttgcaacactctttttgtggaatatgcaagtggatattagggcagctttgaggatttcgttggaaacgggaatacatgtaaaaagcagacagcagcattctcagaaacttctttgtgatgtttgcattgaagtcacagagttgaacattccctttgagagagcaggtttgaaacacgccttttgtcatatctggaagtgtccattcggagcgcattcaggcttgtgttgaaaaaggaaatatcctcccataaaaactagacagaagcattctcagaaacttatctgtgatgtatgtactcaactaacagaactaaaccatcgttttgaaggagcagttttgaaacactctttttgcggaatctgcaagtggatatttggctagctgggaggatttcgttggaaacgggattacatacaaaaagcagacagcagcattctcagaaacttatttgtgatgtgtgccctcaactgagagtgttgaacctttgttttgatagagcagttctgaaacacactttttgtaaaatctgcaagaggatatttggatagctttgaggatttcgttggaaacgggaatgtcttcatgtaaactctagacagaagcattctcagaaactgctttgggatgtttcaattgaagtcccagtgttgaacattccctttcatagagcaggtttgaaacactctttttgtactatctggaagtggacatttggagcgctttcaggtctacggtgaaaaaggagatatcttccaataaaaactagatagaagcaatgtcagaacttttttcatgatgtatctactcagcaaacagagttgaacctttcttttgagagagcagttttgaaacactctttttgtggaatatgcaagtgggtattaggccagcttggaggatttcgttggaaacgggaatacgtataaaaagcagacagcagcattgtcagaaactactttgtgatgtttgcattcaagtcacagaattgaacactccctttcacagagcaggtttgaaacactctttttgtagtgtctgtaagtgaacatttggattgctttcaggcctaaggtgaaaaaggaaatatcttcccataaaaactagacagaagcattctcagaaacttgtttgtgatgtgtgccctctactgacagagttgaacctttctttgcaaagagcagttttgaaacacactttttgtagaatctgcaagaggatatttggatagctttgaggatttcttgggaaacgggaatgtcttcagataaactctagaaagaagcattctcagaaacttctttgggatgtttcaattgaagtcacagtgttgaacattccctttcacagagcaggtttgaaacactctttttgtagtgtctataagtgaacatttggcgtgctttcaggcgtaacgtgaaaaaggaaatatcttcccataaaaactagacagaagcattctcagaaacttgttcgtgatgtgtgccctctactgacagagttgaacctttctttacaaagagcagctttgaaacacactttttgtagaatctgcaagaggatatttggatagctttgaggatttcgttggaaacgggtatgtcttcagataaactctagacagaagcattctcagaaacttctttgggatgttgcatgcaagtcacagagtagaacattcccattcatagagcagatttgaaacactctttttgtagtatctggaagtggacatttggagcgctttcaggcctatgttgaaaaaggaaatatcttcccataaaaactagacggaagcattctcagaaacttacttgtgatgtgtttgctcaactaacagaattgaaccatcgttttgaaggagcagttttgaaacactgttttcgtggaatctgcaagtggatatttggctagctttgaggatttcgatggaaacgggattacatataaaaaggagacagcagcattctgagaaacttctttgtgatgtctgcattcaattcacagagttgagcattccctttcatagagcaggttggaaacactctttttgtagtatctggatgtggacatttggatcgctttctggcctatggtgaaaaaggaaatatcttcccatgaaaactagacagaagcattctcagaaacttatttgtgatgtgtgccctcaactgacagtgttgaacctttgttttgatagagcagttctgaaacacactttttgtaaaatctgcaagaggatatttggatagctttgaggatttcgttggaaacgggaatgtcttcatgtaaactctagacagaagcattctcagaaactgctttgggatgtttcaattgaagtcccagtgttgaacattccctttcatagagcaggtttgaaacactctttttgtactatctggaagtggacatttggagcgctttcaggtctacggtgaaaaaggagatatcttccaataaaaactagatagaagcaatgtcagaacttttttcgtgatgtatctactcagcaaacagagttgaacctttcttttgagagagcagttttgaaacactctttttgtggaatatgcaagtgggtattaggccagcttggaggatttcgttggaaacgggaatacgtataaaaagcagacagcagcattgtcagaaactactttgtgatgtttgcattcaagtcacagaattgaacactccctttcacagagcaggtttgaaacactctttttgtagtgtctgtaagtgaacatttggattgctttcaggcctaaggtgaaaaaggaaatatcttcccataaaaactagacagaagcattctcagaaacttgtttgtgatgtgtgccctctactgacagagttgaacctttctttgcaaagaccagttttgaaacactctttttgtagaatctgcaagaggatatttggatagctttgaggatttcttgggaaacgggaatgtcttcagataaactctagacagaagcattctcagaaacttctttgggatgtttcaattgaagtcacagtgttgaacattccctttcacagagcaggtttgaaacactctttttgtagtgtctataagtgaacatttggcgtgctttcaggcctaacgtgaaaaaggaaatatcttcccataaaaactagacagaagcattctcagaaacttgttcgtgatgtgtgccctctactgacagagttgaacctttctttgcaaagagcagctttgaaacacactttttgtagaatctgcaagaggatatttggatagctttgaggatttcgttggaaacgggtatgtcttcagataaactctagacagaagcattctcagaaacttctttgggatgttgcattcaagtcacagagtagaacattcccattcatagagcagatttgaaacactctttttgtagtatctggaagtggacatttggagcgctttcaggcctatgttgaaaaagggaatatcttcccataaaaactagacggaagcattctcagaaacttatttgtgatgtgtttgctcaactaacaggattgaaccatcgttttgaaggagcagttttgaaacactgttttcgtggaatctgcaagtggatatttggctagctttgaggatttcgttggaaacgggattacatataaaaaggagacagcagcattctcagaaacttctttgtgatgtttgcattcaagtcacagagttgaacattccctttcatagagcaggtttgaaacactctttttgtagtatctggatgtggacatttggatcgctttcaggcctatggtgaaaaaggaaatatcttcccatgaaaactagacagaagcattctcagaagtttatttgtgatgtgtgccctcaactaacagagttgaacctttcttttgatagagcagttttgaaacactctttttgtaaaatctgcaagaggatatttggatagctttgaggatttcgttgcaaacgggaatggcttcatataaactctagacagaagcattctcaagaaacttcgttgggatgtttcgattgaagtcccagtgttgaacattcccttttatagagcaggttggaaacactctttctgcattccctggaagtggacatttggagcgctttcaggacgacggtgaaaatggaaatatcttccaagaaaatctagatagaagcaatgtcagaaacttttatgtgatggatctactcagctaacagagttgaacctttcttttgagagagcagttttgcaacactctttttgtggaatatgcaagtggatattagggcagctttgaggatttcgttggaaacgggaatacatgtaaaaagcagacagcagcattctcagaaacttctttgtgatgtttgcattgaagtcacagagttgaacattccctttgagagagcaggtttgaaacacgccttttgtcatatctggaagtgtccattcggagcgcattcaggcttgtgttgaaaaaggaaatatcctcccagaaaaactagacagaagcattctcagaaacttatctgtgatgtatgtactcaactaacagaactaaaccatcgttttgaaggagcagttttgaaacactctttttgcggaatctgcaagtggatatttggctagctgggaggatttcgttggaaacgggattacatacaaaaagcagacagcagcattctcagaaacttatttgtgatgtgtgccctcaactgacagtgttgaacctttgttttgatagagcagttctgaaacacactttttgtaaaatctgcaagaggatatttggatagctttgaggatttcgttggaaacgggaatgtcttcatgtaaactctacacagaagcattctcagaaactgctttgggatgtttcaattgaagtcccagtgttgaacattccctttcatagagcaggtttgaaaccctctttttgtactatctggaagtggacatttggagcgctttcaggtctacggtgaaaaaggagatatcttccaataaaaactagatagaagcaatgtcagaacttttttcatgatgtatctactcagcaaacagagttgaacctttcttttgagagagcagttttgaaacactctttttgtggaatatgcaagtgggtattaggccagcttggaggatttcgttggaaacgggaatacgtataaaaagcagacagcagcattgtcagaaactactttgtgatgtttgcattcaagtcacagaattgaacactccctttcacagagcaggttagaaacactctttttgtagtgtctgtaagtgaacatttggattcctttcaggcctaaggtgaaaaaggaaatatcttcccataaaaactagacagaagcattctcagaaacttgtttgtgatgtgtgccctctactgacagagttgaacctttctttgcaaagagcagttttgaaacactctttttgtagaatctgcaagaggatatttggatagctttgaggatttcttgggaaacgggaatgtcttcagataaactctagacagaagcattctcagaaacttctttgggatgtttcaattgaagtcacagtgttgaacattccctttcacagagcaggtttgaaacactctttttgtagtgtctataagtgaacatttggcgtggtttcaggggtaacgtgaaaaaggacatatcttcccatgaaaactagacagaaagcattctcagaaacttgttcgtgatgtgtgccctctactgacagagttgaacctttctttgcaaagagcagctttgaaacacactttttgtagaatctgcaagaggatatttggatagctttgaggatttcgttggaaacgggtatgtcttcagataaactctagacagaagcattctcagaaacttctttgggatgttgcattcaagtcacagagtagaacattcccattcatagagcagatttgaaacactctttttgtagtatctggaagtggacatttggagcgctttcaggcctatgttgaaaaaggaaatatcttcccataaaaactagacggaagcattctcagaaacttatttgtgatgtgtttgctcaactaacaggattgaaccatcgttttgaaggagcagttttgaaacactgttttcgtggaatctgcaagtggatatttggctagctttgaggatttcgttggaaacgggattacatatacaaaggagacagcagcattctcagaaacttctttgtgatgtctgcattcaattcacagagttgagcattccctttcgtagagcaggttggaaacactctttttgtagtatctggatgaggacatttggagcgctttcaggcgtatggtgaaaagggaaatatcttcccgtaaaaactagacagaagcattctcagaagtttatttgtgatgtgtgccctcaactaacagagttgaacctttcttttgatagagcagttttgaaacactctttttgtaaaatctgcaagaggatatttggatagctttgaggatttcgttgcaaacgggaatggcttcatataaactctagacagaagcattctcagaaacttcgttgggatgtttcgattgaagtcccagtgttgaacattcccttttatagagcaggttggaaacactctttctgcattccctggaagtggacatttggagcgctttcaggacgacggtgaaaatggaaatatcttccaagaaaatctagatagaagcaacgtcagaaacttttctgtgatggatctactcagctaacagagttgaacctttcttttgagagagcagttttgcaacactctttttgtggaatatgcaagtggatattagggcagctttgaggatttcgttggaaacgggaatacatgtaaaaagcagacagcagcattctcagaaacttctttgtgatgtttgcattgaagtcacagagttgaacattccctttgagagagcaggtttgcaacacgccttttgtcatatctggaagtgtccattcggagcgcattcaggcttgtgttgaaaaaggaaatatcctcccataaaaactagacagaagcattctcagaaacttatttgtgatgtatgtactcaactaacagaactaaaccatcgttttgaaggagcagttttgaaacactctttttgcggaatctgcaactggatatttggctagcttggaggatttcgttggaaacgggattacatacaaaaagcagacagcagcattctcagaaacttctttgtgatgtttgcattcaagtcgcagagttgaacattccctttcatagagcaggtttgcaacactctttttgtagtatctggatgtggacatttggatcgctttcaggcctatgttgaaaaaggaaatatcttcccatgaaaactagacagaagcattctcagaaatttatttgtgatgtgtgccctcaactaacagagttgaacctttcttttgatagagcagttttgaaacactctttttgtaaaatctgcaagaggatatttggatagctttgaggatttcgttgcaaacgggaatggcttcatataaactctagacagaagcattctcagaaacttcgttgggatgtttcgattgaagtcccagtgttgaacattcccttttatagagcaggttggaaacactctttctgcattccctggaagtggacatttggagcgctttcaggacgacggtgaaaatggaaatatcttccaagaaaatctagatagaagcaacgtcagaaacttttctgtgatggatctactcagctaacagagttgaacctttcttttgagagagcagttttgcaacactctttttgtggaatatgcaagtggatattagggcagctttgaggatttcgttggaaacgggaatacatgtaaaaagcagacagcagcattctcagaaacttctttgtgatgtttgcattgaagtcacagagttgaacattccctttgagagagcaggtttgaaacacgccttttgtcatatctggaagtgtccattcggagcgcattcaggcttgtgttgaaaaaggaaatatcctcccataaaaactagacagaagcattctcagaaacttatctgtgatgtatgtactcaactaacagaactaaaccatcgttttgaaggagcagttttgaaacactctttttgcggaatctgcaagtggatatttggctagctgggaggatttcgttggaaacgggattacatacaaaaagcagacagcagcattctcagaaacttatttgtgatgtgtgccctcaactgacagtgttgaacctttgttttgatagagcagttctgaaacacactttttgtaaaatctgcaagaggatatttggatagctttgaggatttcgttggaaacgggaatgtcttcatgtaaactctacacagaagcattctcagaaactgctttgggatgtttcaattgaagtcccagtgttgaacattcccattcatagagcaggtttgaagcactctttttgtactatctggaagtggacatttggagcgctttcaggtctacggtgaaaaaggagatatcttccaataaaaactagatagaagcaatgtcagaacttttttcatgatgtatctactcagcaaacagagttgaacctttcttttgagagagcagttttgacactgtctttgtggaatatgcaagtgggtattaggccagcttggaggatttcgttggaaacgggaatacgtataaaaagcagacagcagcattgtcagaaactactttgtgatgtttgcattcaagtcacagaactgaacactccctttcacagagcaggtttgaaacactctttttgtagtgtctgtaagtgaacatttggattgctttcaggcctaaggtgaaaaaggaaatatcttcccataaaaactagacagaagcattctcagaaacttgtttgtgatgtgtgccctctactgacagagttgaacctttctttgcaaagagcagttttgaaacactctttttgtagaatctgcaagaggatatttggatagctttgaggatttcttgggaaacgggaatgtcttcagataaactctagacagaagcattctcagaaacttctttgggatgtttcaattgaagtcacagtgttgaacattccctttcacagagcaggtttgaaacactctttttgtagtgtctataagtgaacatttggcgtgctttcaggcctaacgtgaaaaaggaaatatcttcccataaaaactagacagaagcattctcagaaacttgttcgtgatgtgtgccctctactgacagagttgaacctttctttgcaaagagcagctttgaaacactctttttgtagaatctgcaagaggatatttggatagctttgaggatttcgttggaaacgggtatgtcttcagataaactctagacagaagcattctcagaaacttctttgggatgttgcattcaagtcacagagtagaacattcccattcatagagcagatttgaaacactctttttgtagtatctggaagtggacatttggagcgctttcaggcctatgttgaaaaaggaaatatcttcccataaaaactagacggaagcattctcagaaacttatttgtgatgtgtttgctcaactaacaggattgaaccatcgttttgaaggagcagttttgaaacactgttttcgtggaatctgcaagtggatatttggctagctttgaggatttcgttggaaacgggattacatataaaaaggagacagcagcattctcagaaacttctttgtgatgtttgcattcaagtcacagagttgaacattccctttcatagagcaggtttgaaacactctttttgtagtatctggatgtggacatttggatcgctttcaggcctatggtgaaaaaggaaatatcttcccatgaaaactagacagaagcattctcagaaatttatttgtgatgtgtgccctcaactaacagagttgaacctttcttttgatagagcagttttgaaacactctttttgtaaaatctgcaagaggatatttggatagctttgaggatttcgttgcaaacgggaatggcttcatataaactctagacagaagcattctcagaaacttcgttgggatgtttcgattgaagtcccagtgttgaacattcccttttatagagcaggttggaaacactctttctgcattccctggaagtggacatttggagcgctttcaggacgacggtgaaaatggaaatatcttccaagaaaatctagatagaagcaacgtcagaaacttttatgtgatggatctactcagctaacagagttgaacctttcttttgagagagcagttttgcaacactctttttgtggaatatgcaagtggatattagggcagctttgaggatttcgttggaaacgggaatacatgtaaaaagcagacagcagcattctcagaaacttctttgtgatgtttgcattgaagtcacagagttgaacattccctttgagagagcaggtttgaaacacgccttttgtcatatctggaagtgtccattcggagcgcattcaggcttgtgttgaaaaaggaaatatcctcccagaaaaactagacagaagcattctcagaaacttatctgtgatgtatgtactcaactaacagaactaaaccaccgttttgaaggagcagttttgaaacactctttttgcggaatctgcaagtggatatttggctagctgggaggatttcgttggaaacgggattacatacaaaaagcagacagcagcattctcagaaacttatttgtgatgtgtgccctcaactgacagtgttgaacctttgttttgatagagcagttctgaaacacactttttgtaaaatctgcaagaggatatttggatagctttgaggatttcgttggaaacgggaatgtcttcatgtaaactctagacagaagcattctcagaaactgctttgggatgtttcaattgaagtcccagtgttgaacattcccattcatagagcaggtttgaaacactctttttgtaatatctggaagtggacatttggagcgctttcaggtctacggtgaaaaaggagatatcttccaataaaaactagatagaagcaatgtcagaacttttttcatgatgtatctactcagcaaacagagttgaacctttcttttgagagagcagttttgaaacactctttttgtggaatatgcaagtgggtattaggccagcttggaggatttcgttggaaacgggaatacgtataaaaagcagacagcagcattgtcagaaactactttgtgatgtttgcattcaagtcacagaattgaacactccctttcacagagcaggtttgaaacactctttttgtagtgtctgtaagtgaacatttggattgctttcaggcctaaggtgaaaaaggaaatatcttcccataaaaactagacagaagcattctcagaaacttgtttgtgatgtgtgccctctactgacagagttgaacctttctttgcaaagagcagttttgaaacactctttttgtagaatctgcaagaggatatttggatagctttgaagatttcttgggaaacgggaatgtcttcagataaactctagacagaagcattctcagaaacttctttgggatgtttcaattgaagtcacagtgttgaacattccctttcacagagcaggtttgaaacactctttttgtagtgtctataagtgaacatttggcgtgctttcaggcgtaacgtgaaaaaggaaatatcttcccataaaaaccagacagaagcattctcagaaacttgttcttgatgtgtcccctctactgacagagttgaacctttctttgcaaagagcagctttgaaacactctttttgtagaatctgcaagaggatatttggatagcttggaggatttcgttagaaacgggtatgtcttcagataaactctagacagaagcattctcagaaacttctttgggatgttgcattcaagtcacagagtagaacattcccattcatagagcagatttgaaacactctttttgtagtatctggaagtggacatttggagcgctttcaggcctatgttgaaaaaggaaatatcttcccataaaaactagacggaagcattctcagaaacttacttgtgatgtgtttgctcaactaacagaattgaaccatcgttttgaaggagcagttttgaaacactgttttcgtggaatctgcaagtggatatttggctagctttgaggatttcgttggaaacgggattacatataaaaaggagacagcagcattctcagaaacttctttgtgatgtctgcattcaattcacagagttgagcattccctttcatagagcaggttggaaacactctttttgtagtatctggatgaggacatttggagcgctttcaggcgtatggtgaaaaaggaaatatcttcccgtaaaaactagacagaagcattctcagaaatttatttgtgatgtgtgccctcaactaacagagttgaacctttcttttgatagagcagttttgaaacactctttttgtaaaatctgcaagaggatatttggatagctttgaggatttcgttgcaaacgggaatggcttcatataaactctagacagaagcattctcagaaacttcgttgggatgtttcgattgaagtcccagtgttgaacattcccttttatagagcaggttggaaacactctttctgcattccctggaagtggacatttggagcgctttcaggacgacggtgaaaatggaaatatcttccaagaaaatctagatagaagcaacgtcagaaacttttatgtgatggatctactcagctaacagagttgaacctttcttttgagagagcagttttgcaacactctttttgtggaatatgcaagtggatattagggcagctttgaggatttcgttggaaacgggaatacatgtaaaaagcagacagcagcattctcagaaacttctttgtgatgtttgcattgaagtcacagagttgaacattccctttgagagagcaggtttgaaacacgccttttgtcatatctggaagtgtccattcggagcgcattcaggcttgtgttgaaaaaggaaatatcctcccataaaaactagacagataagcattctcagaaacttatctgtgatgtatgtactcaactaacaggaactaaaccatcgttttgaaggagcagttttgaaacactctttttgcggaatctgcaagtggatatttggctagctgggaggatttcgttggaaacgggattacatacaaaaagcagagagcagcattctcagaaaccttatttgtgatgtgtgccctcaactgacagtgttgaacctttgttttgatagagcagttctgaaacacactttttgtaaaatctgcaagaggatatttggatagctttgaggatttcgttggaaacgggaatgtcttcatgtaaactctacacagaagcattctcagaaactgctttgggatgtttcaattgaagtcccagtgttgaacattcccattcatagagcaggtttgaaacactctttttgtactatctggaagtggacatttggagcgctttcaggtctacggtgaaaaaggagatatcttccaataaaaactagatagaagcaatgtcagaacttttttcatgatgtatctactcagctaacagagttgaacctttcttttgagagagcagttttgaaacactctttttgtggaatatgcaagtgggtattaggccagcttggaggatttcgttggaaacgggaatacgtataaaaagcagacagcagcattgtcagaaactactttgtgatgtttgcattcaagtcacagaattgaacactccctttcacagagcaggtttgaaacactctttttgtagtgtctgtaagtgaacatttggattgctttcaggcctaaggtgaaaaaggaaatatcttcccataaaaactagacagaagcattctcagaaacttgtttgtgatgtgtgccctctactgacagagttgaacctttctttgcaaagagcagttttgaaacactctttttgtagaatctgcaagaggatatttggatagctttgaggatttcttgggaaacgggaatgtcttcagataaactctagacagaagcattctcagaaacttcttgggatatttcaattgaagtcacagtgttgaacattccctttcacagagcaggtttgaaacactctttttgtagtgtctataagtgaacatttggcgtgctttcaggcctaacgtgaaaaaggaaatatcttcccataaaaactagacagaagcattctcagaaacttgttcgtgatgtgtcccctctactgacagagttgaacctttctttgcaaagagcagctttgaaacacactttttgtagaatctgcaagaggatatttggatagctttgaggatttcgttggaaacgggtatgtcttcagataaactctagacagaagcattctcagaaacttctttgggatgttgcattcaagtcacagagtagaacattcccattcatagagcagatttgaaacactctttttgtagtatctggaagtggacatttggagcgctttcaggcctatgttgaaaaaggaaatatcttcccataaaaactagacggaagcattctcagaaacttaattgtgatgtgtttgctcaactaacaggattgaaccatcgttttgaaggagcagttttgaaacactgttttcgtggaatctgcaagtggatatttggctagctttgaggatttcgttggaaacgggattacatataaaaaggagacagcagcattctcagaaacttctttgtgatgtttgcattcaagtcacagagttgaacattccctttcatagagcaggtttgaaacactctttttgtagtatctggatgcggacatttggatcgctttcaggcctatggtgaaaaaggaaatatcttcccatgaaaactagacagaagcattctcagaaacttatttgtgatgtgtgccctcaactgacagtgttgaacctttgttttgatagagcagttctgaaacacactttttgtaaaatctgcaagaggatatttggatagctttgaggatttcgttggaaacgggaatgtcttcatgtaaactctagacagaagcattctcagaaactgctttgggatgtttcaattgaagtcccagtgttgaacattccctttcatagagcaggtttgaaacactctttttgtactatctggaagtggacatttggagcgctttcaggtctacggtgaaaaaggagatatcttccaataaaaactagatagaagcaatgtcagaacttttttcatgatgtatctactcagcaaacagagttgaacctttcttttgagagagcagttttgaaacactctttttgtggaatatgcaagtgggtattaggccagcttggaggatttcgttggaaacgggaatacgtataaaaagcagacagcagcattgtcagaaactactttgtgatgtttgcattcaagtcacagaactgaacactccctttcacagagcaggtttgaaacactctttttgtagtgtctgtaagtgaacatttggattgctttcaggcctaaggtgaaaaaggaaatatcttcccataaaaactagacagaagcattctcagaaacttgtttgtgatgtgtgccctctactgacagagttgaacctttctttgcaaagaccagttttgaaacactctttttgtagaatctgcaagaggatatttggatagctttgaggatttcttgggaaacgggaatgtcttcagataaactctagacagaagcattctcagaaacttctttgggatgtttcaattgaagtcacagtgttgaacattccctttcacagagcaggtttgaaacactctttttgtagtgtctataagtgaacatttggcgtgctttcaggcctaacgtgaaaaaggaaatatcttcccataaaaactagacagaagcattctcagaaacttgttcgtgatgtgtgccctctactgacagagttgaacctttctttgcaaagagcagctttgaaacactctttttgtagaatctgcaagaggatatgtggatagctttgaggatttcgttggaaacgggtatgtcttcagataaactctagacagaagcattctcagaaacttctttgggatgttgcattcaagtcacagagtagaacattcccattcatagagcagatttgaaacactctttttgtagtatctggaagtggacatttggagcgctttcaggcctatgttgaaaaaggaaatatcttcccataaaaactagacggaagcattctcagaaacttgtttgtgatgtgtgccctctactgacagagtggaacctttctttgcaaagagcagttttgaaaccctctttttgtagaatctgcaagaggatatttggatagatttgagtatttcttgggaaacgggaatgtcttcagataaactctagacagaagcattctcagaaactgctttgggatgttgcattcaagtcacagagttgagcattcccttttatagagcaggtttgaaacactctctttgtagtatctgcatgaggacatttggagcgctttcaggcgtatggtgaaaaaggaaatatcttcccgtaaaaactagacagaagcattctcagaaatttatttgtgatgtgtgccatcaacaaaccgagttgaacctttctttcgatagagcagttttgaaacactctttttgtaaaatctgcaagaggatatttggatagctttgaggatttcgttgcaaacgggaatggcttcatataaactctagacagaagcattctcagagacttcgttggaatgtttcgattgaagtcccagtgttgaacattcacttttacagagcaggttggaaacactctttttgcattccctggaagtggacatttggagcgctttcaggacgacggtgaaaaaggaaatatcttccaataaaatctagatagaagcaatgtgagaaacttttatgtgatggatctactcagctaacagatttgaacctttcttttgagagagcagttttgcaacactctttttgtggaatatgcaagtggatattagggcagctttgaggatttcgttggaaacgggaatatatgtaaaaagcagacagcagcattctcagaaacttctttgtgatgtttgcattgaagtcacagagttgaacattccctttgagagagcaggtttgaaacacgccttttgtcatatctggaagtgtccattcggagcgcattcaggcttgtgttgaaaaaggaaatatcctcccataaaaactagacagaagcattcacagaaacttatttgtgatgtatgtactcaactaacagaactaaaccatcgttttgaaggagcagtgttgaaacactctttttgcggaatctgcaagtggatatttgcctagcttggaggatttcgttggaaacgggattacatataaaaagcagacagcaagcattctcagtaaacttatttgtgatgtgtgccctcaactgacagtgttgaacctttgttttgatagagcagttctgaaacacactttttgtaaaatctgcaagaggatatttggatagctttgaggatttcgttggaaacgggaatgtcttcatgtaaactctagacagaagcattctcagaaactgctttgggatgtttcaattgaagtcccagtgttgaacattcccattcatagagcaggtttgaaacactctttttgtactatctggaagtggacattttgagcgctttcaggtctacggtgaaaaaggagatatcttccaataaaaactagatagaagcaatgtcagaacttttttcatgatgtatctactcagcaaacagagttgaacctttcttttgagagagcagttttgaaacactctttttgtggaatatgcaagtgggtattaggccagcttggaggatttcgttggaaacgggaatacgtataaaaagcagacagcagcattgtcagaaactactttgtgatgtttgcattcaagtcacagaattgaacactccctttcacagagcaggtttgaaacactctttttgtagtgtctgtaagtgaacatttggattgctttcaggcctaaggtgaaaaaggaaatatcttcccataaaaactagacagaagcattctcagaaacttgtttgtgatgtgtgccctctactgacagagttgaacctttctttgcaaagagcagttttgaaacactctttttgtagaatctgcaagaggatatttggatagctttgaggatttcttgggaaacgggaatgtcttcagataaactctagacagaagcattctcagaaacttctttgggatgtttcaattgaagtcacagtgttgaacattccctttcacagagcaggtttgaaacactctttttgtagtgtctataagtgaacatttggcgtgctttcaggcctaacgtgaaaaaggaaatatcttcccataaaaactagacagaagcattctcagaaacttgttcgtgatgtgtgccctctactgacagagttgaaactttctttgcaaagagcagctttgaaacactctttttgtagaatctgcaagaggatatgtggatagctttgaggatttcgttggaaacgggtatgtcttcagataaactctagacagaagcattctcagaaacttctttgggatgtttcaattgaagtcacagtgttgaacattccctttcacagagcaggtttgaaacactctttttgtagtgtctataagtgaacatttggcgtgctttcaggcctaacgtgaaaaaggaaatatcttcccataaaagctagacagaagcattctcagaaacttgttcatgatgtgtgccctctagtgacagagttgaacctttttttgcaaagagcagctttgaaacactctttttgtagaatctgcaagaggatatttggatagcttggaggatttcgttggaaacgggtatgtcttcagataaactctagacagaagcagtctcagaaacttctttgtgatgtttccattgaagtcccagtgttgaacattccatttgagagagcaggtttgaaacacgccttttgtcatgtctggaagctgtccatttggagcacattccggcttgtgttgaaaaaggaaatatcctctcataaaaactagacagaagcattctctgaaacttatttgtgatgtgtgtactcaactaacagaattgaaccatcgttttgaaagagcaattttgaaacactctttttctggaatctgcaagtcgatatttgtctagcattgaggatttcgttggaaacgggattacaaataaaaagcagacagcagcattcccagaaacatctttgcgatgtttgcattcaagtcacagagtttaacattccctttcatagagcaggtttgaaacactctttttgtagtatctggatgtggacatttggagcgctttcaggcctatggtgaaaaaggaaatatcttcccctgaaaactagacagaagcattctcagaaatttatttgtgatgtgtgccctcaactaacagagttgaacctttcttttgatagagcagttttgaaacactctttttgtaaaatctgcaagaggatatttggatagcttgaggatttcgttgcaaacgggaatggcttcatataaactctagacagaagcattctcagaaacttcgttgggatgtttcgattgaagtcccagtgttgaacattcccttttatagagcaggttggaaacactctttctgcattccctggaagtggacatttggagcgctttcaggacgacggtgaaaatggaaatatcttccaagaaaatctagatagaagcaatgtcagaaacttttatgtgatggatctactcagctaacagagttgaacctttcttttgagagagcagttttgcaacactctttttgtggaatatgcaagtggatattagggcagctttgaggatttcgttggaaacgggaatacatgtaaaaagcagacagccagcattctcagaaacttctttgtgatgtttgcattgaagtcacagagttgaacattccctttgagagagcaggtttgaaacacgccttttgtcatatctggaagtgtccattcggagcgcattcaggcttgtgttgaaaaaggaaatatcctcccataaaaactagacagatcattctcagaaacttatctgtgatgtatgtactcaactaacagaactaaaccatcgttttgaaggagcagttttgaaacactctttttgcggaatctgcaagtggatatttggctagctgggaggatttcgttggaaacgggattacatacaaaaagcagacagcagcattctcagaaacttctttgtgatgtttgcattcaagtcacagagttgaacattccctttcatagagcaggtttgaaacactctttttgtagtatctggatgtggacatttggatcgctttcaggcctatggtgaaaaaggaaatatcttcccatgaaaactagacagaagcattctcagaaatttatttgtgatgtgtgccctcaactaacagagttgaacctttcttttgatagagcagttttgaaacactctttttgtaaaatctgcaagaggatatttggatagctttgaggatttcgttgcaaacgggaatggcttcatataaactctagacagaagcattctcagaaacttcgttgggatgtttcgattgaagtcccagtgttgaacattcccttttatagagcaggttggaaacactctttctgcattccctggaagtggacatttggagcgctttcaggacgacggtgaaaatggaaatatcttccaagaaaatctagatagaagcaacgtcagaaacttttctgtgatggatctactcagctaacagagttgaacctttcttttgagagagcagttttgcaacactctttttgtggaatatgcaagtggatattagggcagctttgaggatttcgttggaaacgggaatacatgtaaaaagcagacagcagcattctcagaaacttctttgtgatgtttgcattgaagtcacagagttgaacattccctttgagagagcaggtttgaaacacgccttttgtcatatctggaagtgtccattcggagcgcattcaggcttgtgttgaaaaaggaaatatcctcccataaaaactagacagaagcattctcagaaacttatctgtgatgtatgtactcaactaacagaactaaaccatcgttttgaaggagcagttttgaaacactctttttgcggaatctgcaagtggatatttggctagctgggaggatttcgttggaaacgggattacatacaaaaagcagacagcagcattctcagaaacttatttgtgatgtgtgccctcaactgacagtgttgaacctttgttttgatagagcagttctgaaacacactttttgtaaaatctgcaagaggatatttggatagctttgaggatttcgttggaaacgggaatgtcttcatgtaaactctacacagaagcattctcagaaactgctttgggatgtttcaattgaagtcccagtgttgaacattcccattcatagagcaggtttgaaacactctttttgtactatctggaagtggacatttggagcgctttcaggtctacggtgaaaaaggagatatcttccaataaaaactagatagaaagcaatgtcagcaacttttttcatgatgtatctactcagcaaacagagttgaacctttcttttgagagagcagttttgaaacactctttttgtggaatatgcaagtgggtattaggccagcttggaggatttcgttggaaacgggaatacgtataaaaagcagacagcagcattgtcagaaactactttgtgatgtttgcattcaagtcacagaattgaacactccctttcacagagcaggtttgaaacactctttttgtagtgtctgtaagtgaacatatggattgctttcaggcctaaggtgaaaaaggaaatatcttcccataaaaactagacagaagcattctcagaaacttgtttgtgatgtgtgccctctactgacagagttgaacctttctttgcaaagagcagttttgaaacactctttttgtagaatctgcaagaggatatttggatagctttgaggatttcttgggaaacgggaatgtcttcagataaactctagacagaagcattctcagaaacttctttgggatgtttcaattgaagtcacagtgttgaacattccctttcacagagcaggtttgaaacactctttttgtagtgtctataagtgaacatttggcgtgctttcaggcgtaacgtgaaaaaggaaatatcttcccataaaaactagacagaagcattctcagaaacttgttcgtgatgtgtgccctctactgacagagttgaacctttctttgcaaagagcagctttgaaacactctttttgtagaatctgcaagaggatatttggatagctttgaggatttcgttggaaacgggtatgtcttcagataaactctagacagaagcattctcagaaacttctttgggatgttgcattcaagtcacagagtagaacattcccattcatagagcagatttgaaacactctttttgtagtatctggaagtggacatttggagcgctttcaggcctatgttgaaaaaggaaatatcttcccataaaaactagacggaagcattctcagaaacttatttgtgatgtgtttgctcaactaacaggattgaaccatcgttttgaaggagcagttttgaaacactgttttcgtggaatctgcaagtggatatttggctagctttgaggatttcgttggaaatgggattacatatacaaaggagacagcagcattctcagaaacttctttgtgatgtctgcattcaattcacagagttgagcattccctttcatagagcaggttggaaacactctttttgtagtatctggatgaggacatttggagcgctttcaggcctatggtgaaaaaggaaatatcttcccgtaaaaactagacagaagcattctcagaaatttatttgtgatgtgtgccctcaactaacagagttgaacctttcttttgatagagcagttttgaaacactctttttgtaaaatctgcaagaggatatttggatagctttgaggatttcgttgcaaacgggaatggcttcatataaactctagacagaagcattctcagaaacttcgttgggatgtttcgattgaagtcccagtgttgaacattcccttttatagagcaggttggaaacactctttctgcattccctggaagtggacatttggagcgctttcaggacgacggtgaaaatggaaatatcttccaagaaaatctagatagaagcaacgtcagaaacttttctgtgatggatctactcagctaacagagttgaacctttcttttgagagagcagttttgcaacactctttttgtggaatatgcaagtggatattagggcagctttgaggatttcgttggaaacgggaatacatgtaaaaagcagacagcagcattctcagaaacttctttgtgatgtttgcattgaagtcacagagttgaacattccctttgagagagcaggtttgaaacacgccttttgtcatatctggaagtgtccattcggagcgcattcaggcttgtgttgaaaaaggaaatatcctcccataaaaactagacagaagcattctcagaaacttatctgtgatgtatgtactcaactaacagaactaaaccatcgttttgaaggagcagttttgaaacactctttttgcggaatctgcaagtggatatttggctagctgggaggatttcgttggaaacgggattacatacaaaaagcagacagcagcattctcagaaacttatttgtgatgtgtgccctcaactgacagtgttgaacctttgttttgatagagcagttctgaaacacactttttgtaaaatctgcaagaggatatttggatagctttgaggatttcgttggaaacgggaatgtcttcatgtaaactctagacagaagcattctcagaaactgctttgggatgtttcaattgaagtcccagtgttgaacattccctttcatagagcaggtttgaaacactctttttgtactatctggaagtggacatttggagcgctttcaggtctacggtgaaaaaggagatatcttccaataaaaactagatagaagcaatgtcagaacttttttcatgatgtatctactcagcacacagagttgaacctttcttttgagagagcagttttgaaacactctttttgtggaatatgcaagtgggtattaggccagcttggaggatttcgttggaaacgggaataccgtataaaaagcagacagcagcattgtcagaaactactttgtgatggttttgcattcaagtcacagaattgaacactccctttcacagagcaggtttgaaacactctttttgtagtgtctgtaagtgaacatatggattgctttcaggcctaaggtgaaaaaggaaatatcttcccataaaaactagacagaagcattctcagaaacttgtttgtgatgtgtgccctctactgacagagttgaacctttctttgcaaagaccagttttgaaacactctttttgtagaatctgcaagaggatatttggatagctttgaggatttcttgggaaacgggaatgtcttcagataaactctagacagaagcattctcagaaacttctttgggatgtttcaattgaagtcacagtgttgaacattccctttcacagagcaggtttgaaacactctttttgtagtgtctataagtgaacatttggcgtgctttcaggcctaacgtgaaaaaggaaatatcttcccataaaaactagacagaagcattctcagaaacttgttcgtgatgtgtgccctctactgacagagttgaacctttctttgcaaagagcagctttgaaacactctttttgtagaatctgcaagaggatatttggatagcttggaggatttcgttggaaacgggtatgtcttcagataaactctagacagaagcattctcagaaacttctttgggatgttgcattcaagtcacagagtagaacattcccatgcatagagcagatttgaaacactctttttgtagtatctggaagtggacatttggagcgctttcaggcctatgttgaaaaaggaaatatcttcccataaaaactagacggaagcattctcagaaacttacttgtgatgtgtttgctcaactaacagaattgaaccatcgttttgaaggagcagttttgaaacactgttttcgtggaatctgcaagtggatatttggctagctttgaggatttcgttggaaacgggattacatataaaaaggagacagcagcattctcagaaacttctttgtgatgtttgcattcaagtcacagagttgaacattccctttcatagagcaggtttgaaacactctttttgtagtatctggatgtggacatttggatcgctttcaggcctatggtgaaaaaggaaatatcttcccatgaaaactagacagaagcattctcagaaatttatttgtgttgtgtgccctcaactaacagagttgaacctttcttttgatagagcagttttgaaacactctttttgtaaaatctgcaagaggatatttggatagctttgaggatttcgttgcaaacgggaatggcttcatataaactctagacagaaagcattctcagaaacttcgtcgggatgtttcgattgaagtcccagtgttgaacattcccttttatagagcaggttggaaacactctttctgcattccctggaagtggacaattggagcgctttcaggacgacggtgaaaatggaaatatcttccaataaaatctggatagagcaacgtcagaaacttttctgtgatggatctactcagctaacagagttgaacctttcttttgagagagcagttttgcaacactctttttgtggaatatgcaagtggatattagggcagctttgaggatttcgttggaaacgggaatacatgtaaaaagcagacagcagcattctcagaaacttctttgtgatgtttgcattgaagtcacagagttgaacattccctttgagagagcaggtttgaaacacgccttttgtcatatctggaagtgtccattcggagcgcattcaggcttgtgttgaaaaaggaaatatcctcccataaaaactagacagaagcattctcagaaacttatctgtgatgtatgtactcaactaacagaactaaaccatcgttttgaaggagcagttttgaaacactctttttgcggaatctgcaagtggatatttggctagctgggaggatttcgttggaaacgggattacatacaaaaagcagacagcagcattctcagaaacttatttgtgatgtgtgccctcaactgacagtgttgcacctttgttttgatagagcagttctgaaacacactttttgtaaaatctgcaagaggatatttggatagctttgaggatttcgttggaaacgggaatgtcttcatgtaaactctagacagaagcattctcagaaactgctttgggatgtttcaactgaagtcccagtgttgaacattccctttcatagagcaggtttgaaacactctttttggagtatctggaagtggacatttggagcgctttcaggtctacggtgaaaaaggagatatcctccaataaaaactagatagaagcaatgtcagaacttttttcatgatgtatctactcaggaaacagagctgaacctttcttttgacagagcagttttgaaacactctttttgtggaatatgcaagtgggtattaggccagcttggaggatttcgttggaaacgggaatacgtataaaaagcagacagcagcattgtcagaaactactttgtgatgtttgcattcaagtcacagaattgaacactccctttcacagagcaggtttgaaacactctttttgtagtgtctgtaagtgaacatttggattgctttcaggcctaaggtgaaaaaggaaatatcttcccataaaaactagacagaagcattctcagaaacttgtttgtgatgtgtgccctctactgacagagttgaacctttctttgcaaagagcagttttgaaacactctttttgtagaatctgcaagaggatatttggatagctttgaggatttcttgggaaacgggaaatgtgttcagataaactctagacagaagcattctcagaaacttctttgggatgtttcaattgaagtcacagtgttgaacattccctttcacagagcaggtttgaaacactctttttgtagtgtctataagtgaacatttggcgtgctttcaggcctaacgtgaaaaaggaaatatcttcccataaaaactagacagaagcattctcagaaacttgttcgtgatgtgtgccctctactgacagagttgaacctttctttgcaaagagcagctttgaaacacactttttgtagaatctgcaagaggatatttggatagcttggaggatttcgttggaaacgggtatgtcttcagataaactctagacagaagcattctcagaaatttctttgggatgttgcatgcaagtcacagagtagaacattcccattcatagagcagatttgaaacactctttttgtagtatctggaagtggacatttggagcgctttcaggcctatgttgaaaaaggaaatatcttcccataaaaactagacggaagcattctcagaaacttatttgtgatgagtttgctcaactaacaggattgaaccatcgttttgaaggagcagttttgaaacactgttttcgtggaatctgcaagtggatatttggctagctttgaggatttcgttggatacgggattacatataaaaaggagacagcagcattctcagaaacttctttgtgatgtctgcattcaattcacagagttgaacattccctttcatagagcaggtttgaaacactctttttgtagtatctggatgtggacatttggatcgctttcaggcctatggtgaaaaaggaaatatcttcccatgaaaactagacagaagcattctcagaaatttatttgtgatgtgtgccctcaactaacacagttgaacctttcttttgatagagcagttttgaaacactctttttgtaaaatctgcaagaggatatttggatagctttgaggatttcgttgcaaacgggaatggcttcatataaactctagacagaaagcattctcagaaacttcgttgggatgtttcgattgaagtcccagtgttgaacattcccttttatagagcaggttggaaacactctttctgcattccctggaagtggacatttggagcgctttcaggacgacggtgaaaatggaaatatcttccaataaaatctagatagaagcaacgtcagaaacttttatgtgatggatctactcagctaacagagttgaacctttcttttgagagagcagttttgcaacactctttttgtggaatatgcaagtggatattagggcagctttgaggatttcgttggaaacgggaatacatgtaaaaagcagacagcagcattctcagaaacttctttgtgatgtttgcattgaagtcacagagttgaacattccctttgagagagcaggtttgaaacacgccttttgtcatatctggaagtgtccattcggagcgcattcaggcttgtgttgaaaaaggaaatatcctcccataaaaactagacagaagcattctcagaaacttatctgtgatgtatgtactcaactaacagaactaaaccatcgttttgaaggagcagttttgaaacactctttttgcggaatctgcaagtggatatttggctagctgggaggatttcgttggaaacgggattacatacaaaaagcagacagcagcattctcagaaacttatttgtgatgtgtgccctcaactgacagtgttgaacctttgttttgatagagcagttctgaaacacactttttgtaaaatctgcaagaggatatttggatagctttgaggatttcgttggaaacgggaatgtcttcatgtaaactctagacagaagcattctcagaaactgctttgggatgtttcaattgaagtcccagtgttgaacattccctttcatagagcaggtttgaaaccctctttttgtactatctggaagtggacatttggagcgctttcaggtctacggtgaaaaaggagatatcttccaataaaaactagatagaagcaatgtcagaacttttttcatgatgtatctactcagcaaacagagttgaacctttcttttgagagagcagttttgaaacactctttttgtggaatatgcaagtgggtattaggccagcttggaggatttcgttggaaacgggaatacgtataaaaagcagacagcagcattgtcagaaactactttgtgatgtttgcattcaagtcacagaattgaacactccctttcacagagcaggtttgaaacactctttttgtagtgtctgtaagtgaacatttggattgctttcaggcctaaggtgaaaaaggaaatatcttcccataaaaactagacagaagcattctcagaaacttgtttgtgatgtgtgccctctactgacagagttgaacctttctttgcaaagagcagttttgaaacactctttttgtagaatctgcaagaggatatttggatagctttgaggatttcttgggaaacgggaatgtcttcagataaactctagacagaagcattctcagaaacttctttgggatgtttcaattgaagtcacagtgttgaacattccctttcacagagcaggtttgaaacactctttttgtagtgtctataagtgaacatttggcgtgctttcaggcctaacgtgaaaaaggaaatatcttcccataaaaactagacagaagcattctcagaaacttgttcatgatgtgtgccctctactgacagagttgaacctttctttgcaaagagcagctttgaaacactctttttgtagaatctgcaagaggatatttggatagctttgaggatttcgttggaaacgggtatgtcttcagataaactctagacagaagcattctcagaaacttctttgggatgttgcattcaagtcacagagtagaacattcccattcatagagcagatttgaaacactctttttgtagtatctggaagtggacatttggagcgctttcaggcctatgttgaaaaaggaaatatcttcccataaaaactagacggaagcattctcagaaacttatttgtgatgtgtttgctcaactaacaggattgaaccatcgttttgaaggagcagttttgaaacactgttttcatggaatctgcaagtggatatttggctagctttgaggatttcgttggaaacgggattacatataaaaaggagacagcagcattctcagaaacttctttgtgatgtctgcattcaattcacagagttgagcattccctttcatagagcaggttggaaacactctttttgtagtatctggatgaggacatttggagcgctttcaggcctatggtgaaaaaggaaatatcttcccgtaaaaactagacagaagcattctcagaaatttatttgtgatgtgtgccctcaactaacagagttgaacctttcttttgatagagcagttttgaaacactctttttgtaaaatctgcaagaggatatttggatagctttgaggatttcgttgcaaacgggaatggcttcatataaactctagacagaagcattctcagaaacttcgttgggatgtttcgattgaagtcccagtgttgaacattcccttttatagagcaggttggaaacactctttctgcattccctggaagtggacatttggagcgctttcaggacgacggtgaaaatggaaatatcttccaagaaaatctagatagaagcaatgtcagaaacttttatgtgatggatctactcagctaacagagttgaagctttcttttgagagagcagttttgcaacactctttttgtggaatatgcaagtggatattagggcagctttgaggatttcgttggaaacgggaatacatgtaaaaagcagacagcagcattctcagaaacttctttgtgatgtttgcattgaagtcacagagttgaacattccctttgagagagcaggtttgaaacacgccttttgtcatatctggaagtgtccattcggagcgcattcaggcttgtgttgaaaaaggaaatatcctcccataaaaactagacagaagcattctcagaaacttatctgtgatgtatgtactcaactaacagaactaaaccatcgttttgaaggagcagttttgaaacactctttttgcggaatctgcaagtggatatttggctagctgggaggatttcgttggaaacgggattacatacaaaaagcagacagcagcattctcagaaacttatttgtgatgtgtgccctcaactgacagtgttgaacctttgttttgatagagcagttctgaaacacactttttgtaaaatctgcaagaggatatttggatagctttgaggatttcgttggaaacgggaatgtcttcatgtaaactctacacagaaagcattctcagaaactgctttgggatgtttcaattgaagtcccagtgttgaacattcccattcatagagcaggtttgaaacactctttttgtactatctggaagtggacatttggagcgctttcaggtctacggtgaaaaaggagatatcttccaataaaaactagatagaagcaatgtcagaacttttttcatgatgtatctactcagcacacagagttgaacctttcttttgagagagcagttttgaaacactctttttgtggaatatgcaagtgggtattaggccagcttggaggatttcgttggaaacgggaatacgtataaaaagcagacagcagcattgtcagaaactactttgtgatgtttgcattcaagtcacagaattgaacactccctttcacagagcaggtttgaaacactctttttgtagtgtctgtaagtgaacatttggattgctttcaggcttaaggtgaaaaaggaaatatcttcccataaaaactagacagaagcactctcagaaacttgtttgtgatgtgtgccctctactgacagagttgaacctttctttgcaaagagcagttttgaaacactccttttgtagaatctgcaagaggatatttggatagctttgaggatttcttgggaaacgggaatgtcttcagataaactctagacagaagcattctcagaaacttctttgggatgtttcaattgaagtcacagtgttgaacattccctttcacagagcaggtttgaaacactctttttgtagtgtctataagtgaacatttggcgtgctttcaggcctaacgtgaaaaaggaaatatcttcccataaaaactagacagaagcattctcagaaacttgttcgtgatgtgtgccctctactgacagagttgaacctttctttgcaaagagcagctttgaaacactctttttgtagaatctgcaagaggatatgtggatagctttgaggatttcgttggaaacgggtatgtcttcagataaactctagacagaagcattctcagaaatttctttgggatgttgcatgcaagtcacagagtagaacattcccattcatagagcagatttgaaacactctttttgtagtatctggaagtggacatttggagcgctttcaggcctatgttgaaaaaggaaatatcttcccataaaaactagacggaagcattctcagaaacttaattgtgatgtgtttgctcaactaacaggattgaaccatcgttttgaaggagcagttttgaaacactgttttcgtggaatctgcaagtggatatttggctagctttgaggatttcgttggaaacgggattacatataaaaaggagacagcagcattctcagaaacttctttgtgatgtttgcattcaagtcacagagttgaacattccctttcatagagcaggtttgaaacactctttttgtagtatctggatgtggacatttggatcgctttcaggcctatggtgaaaaaggaaatatcttcccatgaaaactagacagaagcattctcagaagtttatttgtgatgtgtgccctcaactaacagagttgaacctttcttttgatagagcagttttgaaacactctttttgtaaaatctgcaagaggatatttggatagctttgaggatttcgttgcaaacgggaatggcttcatataaactctagacagaagcattctcagaaacttcgttgggatgtttcgattgaagtcccagtgttgaacattcccttttatagagcaggttggaaacactctttctgcattccctggaagtggacatttggagcgctttcaggacgacggtgaaaatggaaatatcttccaagaaaatctagatagaagcaatgtcagaaacttttatgtgatggatctactcagctaacagagttgaacctttcttttgagagagcagttttgcaacactctttttgtggaatatgcaagtggatattagggcagctttgaggatttcgttggaaacgggaatacatgtaaaaagcagacagcagcattctcagaaacttctttgtgatgtttgcattgaagtcacagagttgaacattccctttgagagagcaggtttgaaacacgccttttgtcatatctggaagtgtccattcggagcgcattcaggcttgtgttgaaaaaggaaatatcctcccagaaaaactagacagaagcattctcagaaacttatctgtgatgtatgtactcaactaacagaactaaaccatcgttttgaaggagcagttttgaaacactctttttgcggaatctgcaagtggatatttggctagctgggaggatttcgttggaaacgggattacatacaaaaagcagacagcagcattctcagaaacttatttgtgatgtgtgccctcaactgacagtgttgaacctttgttttgatagagcagttctgaaacacactttttgtaaaatctgcaagaggatatttggatagctttgaggatttcgttggaaacgggaatgtcttcatgtaaactctagacagaagcattctcagaaactgctttgggatgtttcaattgaagtcccagtgttgaacattcccattcatagagcaggtttgaaacacactttttgtactatctggaagtggacatttggagcgctttcaggtctacggtgaaaaaggagatatcttccaataaaaactagatagaagcaatgtcagaacttttttcatgatgtatctactcagcaaacagagttgaacctttcttttgagagagcagttttgaaacactctttttgtggaatatgcaagtgggtattaggccagcttggaggatttcgttggaaacgggaatacgtataaaaagcagacagcagcattgtcagaaactactttgtgatgtttgcattcaagtcacagaattgaacactccctttcacagagcaggtttgaaacactctttttgtagtgtctgtaagtgaacatttggattgctttcaggcctaaggtgaaaaaggaaatatcttcccataaaaactagacagaagcattctcagaaacttgtttgtgatgtgtgccctctactgacagagttgaacctttctttgcaaagagcagttttgaaacactctttttgtagaatctgcaagaggatatttggatagctttgaggatttcttgggaaacgggaatgtcttcagataaactctagacagaagcattctcagaaacttctttgggatgtttcaattgaagtcacagtgttgaacattccctttcacagagcaggtttgaaacactctttttgtagtgtctataagtgaacatttggcgtgctttcaggcctaacgtgaaaaaggaaatatcttcccataaaaactagacagaagcattctcagaaacttgttcgtgatgtgtgccctctactgacagagttgaacctttctttgcaaagagcagctttgaaacacactttttgtagaatctgcaagaggatatttggatagcttggaggatttcgttggaaacgggtatgtcttcagataaactctagacagaagcattctcagaaacttctttgggatgttgcattcaagtcacagagtagaacattcccattcatagagcagatttgaaacactctttttgtagtatctggaagtggacatttggagcgctttcaggcctatgttgaaaaaggaaatgtcttcccataaaaactagacggaagcattctcagaaacttacttgtgatgtgtttgctcaactaacagaattgaaccatcgttttgaaggagcagttttgaaacactgttttcgtggaatctgcaagtggatatttggctagctttgaggatttcgttggaaacgggattacatataaaaaggagacagcagcattctcagaaacttctttgtgatgtctgcattcaattcacagagttgagcattccctttcatagagcaggttggaaacactctttttgtagtatctggatgaggacatttggagcgctttcaggcgtatggtgaaaaaggaaatatcttcccgtaaaaactagacagaagcattctcagaaatttatttgtgatgtgtgccctcaactaacagagttgaacctttcttttgatagagcagttttgaaacactctttttgtaaaatctgcaagaggatatttggatagctttgaggatttcgttgcaaacgggaatggcttcatataaactctagacagaagcattctcagaaacttcgttgggatgtttcgattgaagtcccagtgttgaacattcccttttatagagcaggttggaaacactctttctgcattccctggaagtggacatttggagcgctttcaggacgacggtgaaaatggaaatatcttccaataaaatctagatagaagcaacgtcagaaacttttctgtgatggatctactcagctaacagagttgaacctttcttttgagagagcagttttgcaacactctttttgtggaatatgcaagtggatattagggcagctttgaggatttcgttggaaacgggaatacatgtaaaaagcagacagcagcattctcagaaacttctttgtgatgtttgcattgaagtcacagagttgaacattccctttgagagagcaggtttgaaacacgccttttgtcatatctggaagtgtccattcggagcgcattcaggcttgtgttgaaaaaggaaatatcctcccataaaaactagacagaagcattctcagaaacttatctgtgatgtatgtactcaactaacagaactaaaccatcgttttgaaggagcagttttgaaacactctttttgcggaatctgcaagtggatatttggctagctgggaggatttcgttggaaacgggattacatacaaaaagcagagagcagcattctcagaaacttatttgtgatgtgtgccctcaactgacagtgttgaacctttgttttgatagagcagttctgaaacacactttttgtaaaatctgcaagaggatatttggatagctttgaggatttcgttggaaacgggaatgtcttcatgtaaactctagacagaagcattctcagaaactgctttgggatgtttcaattgaagtcccagtgttgaacattccctttcatagagcaggtttgaaacactctttttgtactatctggaagtggacatttggagcgctttcaggtctacggtgaaaaaggagatatcttccaataaaaactagatagaagcaatgtcagaacttttttcatgatgtatctactcagcaaacagagttgaacctttcttttgagagagcagttttgaaacactctttttgtggaatatgaaagtgggtattaggccagcttggaggatttcgttggaaacgggaatacgtataaaaagcagacagcagcattgtcagaaactactttgtgatgtttgcattcaagtcacagaattgaacactccctttcacagagcaggtttgaaacactctttttgtagtgtctgtaagtgaacatttggattgctttcaggtctaaggtgaaaaaggaaatatcttcccataaaaactagacagaagcattctcagaaacttgtttgtgatgtgtgccctctactgacagagttgaacctttctttgcaaagagcagttttgaaacactctttttgtagaatctgcaagaggatatttggatagctttgaggatttcttgggaaacgggaatgtcttcagataaactctagacagaagcattctcagaaacttcttgggatatttcaattgaagtcacagtgttgaacattccctttcacagagcaggtttgaaacactctttttgtagtgtctataagtgaacatttggcgtgctttcaggcctaacgtgaaaaaggaaatatcttcccataaaaactagacagaagcattctcagaaacttgttcgtgatgtgtgccctctactgacagagttgaacctttctttgcaaagagcagctttgaaacacactttttgtagaatctgcaagaggatatttggatagcttggaggatttcgttggaaacgggtatgtcttcagataaactctagacagaagcattctcagaaacttctttgggatgttgcattcaagtcacagagtagaacattcccattcatagagcagatttgaaacactctttttgtagtatctggaagtggacatttggagcgctttcaggcctatgttgaaaaaggaaatatcttcccataaaaactagacggaagcattctcagaaacttaattgtgatgtgtttgctcaactaacaggattgaaccatcgttttgaaggagcagttttgaaacactgttttcgtggaatctgcaagtggatatttggctagctttgaggatttcgttggaaacgggattacatataaaaaggagacagcagcattctcagaaacttctttgtgatgtctgcattcaagtcacagagttgagcattccctttcatagagcaggttggaaacactctttttgtagtatctggatgaggacatttggagcgctttcaggcgtatggtgaaaaaggaaatatcttcccgtaaaaactagacagaagcattctcagaagtttatttgtgatgtgtgccctcaactaacagagttgaacctttcttttgatagagcagttttgaaacactctttttgtaaaatctgcaagaggatatttggatagctttgaggatttcgttgcaaacgggaatggcttcatataaactctagacagaagcattctcagaaacttcgttgggatgtttcgattgaagtcccagtgttgaacattcccttttatagagcaggttggaaacactctttctgcattccctggaagtggacatttggagcgctttcaggacgacggtgaaaatggaaatatcttccaagaaaatctagatagaagcaatgtcagaaacttttatgtgatggatctactcagctaacagagttgaacctttcttttgagagagcagttttgcaacactctttttgtggaatatgcaagtggatattagggcagctttgaggatttcgttggaaacgggaatacatgtaaaaagcagacagcagcattctcagaaacttctttgtgatgtttgcattgaagtcacagagttgaacattccctttgagagagcaggtttgaaacacgccttttgtcatatctggaagtgtccattcggagcgcattcaggcttgtgttgaaaaaggaaatatcctcccataaaaactagacagaagcattctcagaaacttatctgtgatgtatgtactcaactaacagaactaaaccatcgttttgaaggagcagttttgaaacactctttttgcggaatctgccagtggatatttggctagctgggaggatttcgttggaaacgggattacatacaaaaagcagacagcagcattctcagaaacttatttgtgatgtgtgccctcaactgacagtgttgaacctttgttttgatagagcagttctgaaacacactttttgtaaaatctgcaagaggatatttggatagctttgaggatttcgttggaaacgggaatgtcttcatgtaaactctagacagaagcattctcagaaactgctttgggatgtttcaattgaagtcccagtgttgaacattcccattcatagagcaggtttgaaacactctttttgtactatctggaagtggacatttggagcgctttcaggtctacggtgaaaaaggagatatcttccaataaaaactagatagaagcaatgtcagaacttttttcatgatgtatctactcagcaaacagagttgaacctttcttttgagagagcagttttgaaacactctttttgtggaatatgcaagtgggtattaggccagcttggaggatttcgttggaaacgggaatacgtataaaaagcagacagcagcattgtcagaaactactttgtgatgtttgcattcaagtcacagaattgaacactccctttcacagagcaggtttgaaacactctttttgtagtgtctgtaagtgaacatatggattgctttcaggcctaaggtgaaaaaggaaatatcttcccataaaaactagacagaagcattctcagaaacttgtttgtgatgtgtgccctctactgacagagttgaacctttctttgcaaagagcagttttgaaacactctttttgtagaatctgcaagaggatatttggatagctttgaggatttcttgggaaacgggaatgtcttcagataaactctagacagaagcattctcagaaacttctttgggatgtttcaattgaagtcacagtgttgaacattccctttcacagagcaggtttgaaacactctttttgtagtgtctataagtgaacatttggcgtgctttcaggcctaacgtgaaaaaggaaatatcttcccataaaaactagacagaagcattctcagaaacttgtttgtgatgtgtgccctctactgacagagttgaacctttctttgcaaagagcagctttgaaacactctttttgtagaatctgcaagaggatatttggatagctttgaggatttcgttggaaacgggtatgtcttcacataaactctagacagaagcattctcagaaacttctttgggatgttgcattcaagtcacagagtagaacattcccattcatagagcagatttgaaacactctttttgtagtatctggaagtggacatttggagcgctttcaggcctatgttgaaaaaggaaatatcttcccataaaaactagacggaagcattctcagaaacttatttgtgatgtgtttgctcaactaacaggattgaaccatcgttttgaaggagcagttttgaaacactgttttcgtggaatctgcaagtggatatttggctagctttgaggatttcgttggaaacgggattacatataaaaaggagacagcagcattctcagaaacttctttgtgatgtctgcattcaagtcacagagttgagcattccctttcatagagcaggttggaaacactctttttgtagtatctggatgaggacatttggagcgctttcaggcgtatggtgaaaaaggaaatatcttcccgtaaaaactagacagaagcattctcagaaatttatttgtgttgtgtgccctcaactaacagagttgaacctttcttttgatagagcagttttgaaacactctttttgtaaaatctgcaagaggatatttggatagctttgaggatttcgttgcaaacgggaatggcttcatataaactctagacagaagcattctcagaaacttcgttgggatgtttcgattgaagtcccagtgttgaacattcccttttatagagcaggttggaaacactctttctgcattccctggaagtggacatttggagcgctttcaggacgacggtgaaaatggaaatatcttccaagaaaatctagatagaagcaatgtcagaaacttttatgtgatggatctactcagctaacagagttgaacctttcttttgagagagcagttttgcaacactctttttgtggaatatgcaagtggatattagggcagctttgaggatttcgttggaaacgggaatacatgtaaaaagcagacagcagcattctcagaaacttctttgtgatgtttgcattgaagtcacagagttgaacattccctttgagagagcaggtttgaaacacgccttttgtcatatctggaagtgtccattcggagcgcattcaggcttgtgttgaaaaaggaaatatcctcccataaaaactagacagaagcattctcagaaacttatctgtgatgtatgtactcaactaacagaactaaaccatcgttttgaaggagcagttttgaaacactctttttgcggaatctgcaagtggatatttggctagctgggaggatttcgttggaaacgggattacatacaaaaagcagacagcagcattctcagaaacttatttgtgatgtgtgccctcaactgacagtgttgaacctttgttttgatagagcagttctgaaacacactttttgtaaaatctgcaagaggatatttggatagctttgaggatttcgttggaaacgggaatgtcttcatgtaaactctagacagaagcattctcagaaacttcgttgggatgtttcgattgaagtcccagtgttgaacattcccattcatagagcaggtttgaaactctctttttgtactatctggaagtggacatttggagcgctttcaggtctacggtgaaaaaggagatatcttccaataaaaactagatagaagcaatgtcagaacttttttcatgatgtatctactcagcaaacagagttgaacctttcttttgagagagcagttttgaaacactctttttgtggaatatgcaagtgggtattaggccagcttggaggatttcgttggaaacgggaatacgtataaaaagcagacagcagcattgtcagaaactactttgtgatatttgcattcaagtcacagaattgaacactccctttcacagagcaggtttgaaacactctttttgtagtgtctgtaagtgaacatttggattgctttcaggcctaaggtgaaaaaggaaatatcttcccataaaaactagacagaagcattctcagaaacttgtttgtgatgtgtgccctctactgacagagttgaacctttctttgcaaagagcagttttgaaacactctttttgtagaatctgcaagaggatatttggatagctttgaggatttcttgggaaacgggaatgtcttcagataaactctagacagaagcattctcagaaacttctttgggatgtttcaattgaagtcagtgttgaacattccctttcacagagcaggtttgaaacactctttttgtagtgtctataagtgaacatttggcgtgctttcaggcctaacgtgaaaaaggaaatatcttcccataaaaactagacagaagcattctcagaaacttgttcgtgatgtgtgccctctactgacagagttgaacctttctttgcaaagagcagctttgaaacactctttttgtagaatctgcaagaggatatttggatagctttgaggatttcgttggaaacgggtatgtcttcagataaactctagacagaagcattctcagaaacttctttgggatgttgcattcaagtcacagagtagaacattcccattcatagagcagatttgaaacactctttttgtagtatctggaagtggacatttggagcgctttcaggcctatgttgaaaaaggaaatatcttcccataaaaactagacggaagcattctcagaagcttatttgtgatgtgtttgctcaactaacaggattgaaccatcgttttgaaggagcagttttgaaacactgttttcgtggaatctgcaagtggatatttggctagctttgaggatttcgttggaaacgggattacatataaaaaggagacagcagcattctcagaaacttctttgtgatgtttgcattcaagtcacagagttgaacattccctttcatagagcaggtttgaaacactctttttgtagtatctggatgtggacatttggatcgctttcaggcctatggtgaaaaaggaaatatcttcccatgaaaactagacagaagcattctcagaagtttatttgtgatgtgtgccctcaactaacagagttgaacctttcttttgatagagcagttttgaaacactctttttgtaaaatctgcaagaggatatttggatagctttgaggatttcgttgcaaacgggaatggcttcatataaactctagacagaagcattctcagaaacttcgttgggatgtttcgattgaagtcccagtgttgaacattcccttttatagagcaggttggaaacactctttctgcattccctggaagtggacatttggagcgctttcaggacgacggtgaaaatggaaatatcttccaagaaaatctagatagaagcaatgtcagaaacttttatgtgatggatctactcagctaacagagttgaacctttcttttgagagagcagttttgcaacactctttttgtggaatatgcaagtggatattagggcagctttgaggatttcgttggaaacgggaatacatgtaaaaagcagacagcagcattctcagaaacttctttgtgatgtttgcattgaagtcacagagttgaacattccctttgagagagcaggtttgaaacacgccttttgtcatatctggaagtgtccattcggagcgcattcaggcttgtgttgaaaaaggaaatatcctcccataaaaactagacagaagcattctcagaaacttatctgtgatgtatgtactcaactaacagaactaaaccatcgttttgaaggagcagttttgaaacactctttttgcggaatctgcaagtggatatttggctagctgggaggatttcgttggaaacgggattacatacaaaaagcagacagcagcattctcagaaacttatttgtgatgtgtgccctcaactgacagtgttgaacctttgttttgatagagcagttctgaaacacactttttgtaaaatctgcaagaggatatttggatagctttgaggatttcgttggaaacgggaatgtcttcatgtaaactctagacagaagcattctcagaaactgctttgggatgtttcaattgaagtcccagtgttgaacattcccattcatagagcaggtttgaaacactctttttgtactatctggaagtggacatttggagcgctttcaggtctacggtgaaaaaggagatatcttccaataaaaactagatagaagcaatgtcagaacttttttcatgatgtatctactcagctaaaagagttgaacctttcttttgagagagcagttttgaaacactctttgtgtggaatatgcaagtgggtattaggccagcttggaggatttcgttggaaacgggaatacgtataaaaagcagacagcagcattgtcagaaactactttgtgatgtttgcattcaagtcacagaattgaacactccctttcacagagcaggtttgaaacactctttttgtagtgtctgtaagtgaacatatggattgctttcaggcctaaggtgaaaaaggaaatatcttcccataaaaactagacagaagcattctcagaaacttgtttgtgatgtgtgccctctactgacagagttgaacctttctttgcaaagagcagttttgaaacactctttttgtagaatctgcaagaggatatttggatagctttgaggatttcttgggaaacgggaatgtcttcagataaactctagacagaagcactctcagaaacttctttgggatgtttcaattgaagtcacagtgttgaacattccctttcacagagcaggtttgaaacactctttttgtagtgtctataagtgaacatttggcgtgctttcaggcctaacgtgaaaaaggaaatatcttcccataaaaactagacagaagcattctcagaaacttgttcttgatgtgtcccctctactgacagagttgaacctttctttgcaaagagcagctttgaaacactctttttgtagaatctgcaagaggatatttggatagcttggaggatttcgttggaaacgggtatgtcttcagataaactctagacagaagcattctcagaaacttctttgggatgttgcattcaagtcacagagtagaacattcccattcatagagcagatttgaaacactctttttgtagtatctggaagtggacatttggagcgctttcaggcctatgttgaaaaaggaaatatcttcccataaaaactagacggaagcattctcagaaacttatttgtgatgtgtttgctcaactaacaggattgaaccatcgttttgaaggagcagttttgaaacactgttttcgtggaatctgcaagtggatatttggctagctttgaggatttcgttggaaatgggattacatatacaaaggagacagcagcattctgagaaacttctttgtgatgtctgcattcaattcacagagttgagcattccctttcatagagcaggtttgaaacactctttttgtagtatctggatgtggacatttggatcgctttcaggcctatggtgaaaaaggaaatatcttcccatgaaaactagacagaagcattctcagaagtttatttgtgatgtgtgccctcaactaacagagttgaacctttcttttgatagagcagttttgaaacactctttttgtaaaatctgcaagaggatatttggatagctttgaggatttcgttgcaaacgggaatggcttcatataaactctagacagaagcattctcagaaacttcgttgggatgtttcgattgaagtcccagtgttgaacattcccttttatagagcaggttggaaacactctttctgcattccctggaagtggacatttggagcgctttcaggacgacggtgaaaatggaaatatcttccaagaaaatctagatagannnnnnnnnnnnnnnnnnnnnnnnnnnnnnnnnnnnnnnnnnnnnnnnnnnnnnnnnnnnnnnnnnnnnnnnnnnnnnnnnnnnnnnnnnnnnnnnnnnnccctttttatatgttgctgaatttagtttgccagtatatcgtggaggatttttgcatctatatcataagagatattagtgtgtggttttcttttcttgtgacgcatttgtcatcaggataatagtgggttcataaaatgaattggaaagttttccttcttcatctatttattggaaaagtttgtgaaacattggtattaattctttaaatgtttaatagcattcaccagtgaagtccaggcatggtggctcgtgcctggcaaacagagttgaacctttcttttgagagagcagttttgcaacactctttttgtggaatatgcaagtggatattagggcagctttgaggatttcgttggaaacgggaatacatgtaaaaagcagacagcagagcattctcagaaacttctttgtgatgtttgcattgaagtcacagagttgaacattccctttgagagagcaggtttgaaacacgccttttgtcatatctggaagtgtccattcggagcgcattcaggcttgtgttgaaaaaggaaatatcctcccataaaaactagacagaagcattctcagaaacttatctgtgatgtatgtactcaactaacagaactaaaccatcgttttgaaggagcagttttgaaacactctttttgcggaatctgcaagtggatatttggctagctgggaggatttcgttggaaacgggattacatacaaaaagcagacagcagcattctcagaaacttatttgtgatgtgtgccctcaactgacagtgttgaacctttgttttgatagagcagttctgaaacacactttttgtaaaatctgcaagaggatatttggatagctttgaggatttcgttggaaacgggaatgtcttcatgtaaactctagacagaagcattctcagaaactgctttgggatgtttcaattgaagtcccagtgttgaacattccctttcatagagcaggtttgaaacactctttttgtactatctggaagtggacatttggagcgctttcaggtctacggtgaaaaaggagatatcttccaataaaaactagatggaagcaatgtcagaacttttttcatgatgtatctactcagcaaacagagttgaacctttcttttgagagagcagttttgaaacactctttttgtggaatatgcaagtgggtattaggccagcttggaggatttcgttggaaacgggaatacgtatgaaaagcagacagcagcattgtcagaaactactttgtgatgtttgcattcaagtcacagaattgaacactccctttcacagagcaggtttgaaacagtctttttgtagtgtctgtaagtgaacatttggattgctttcaggcctaaggtgaaaaaggaaatatcttcccataaaaactagacagaagcattctcagaaacttgtttgtgatgtgtgccctctactgacagagttgaacctttctttgcaaagagcagttttgaaacactctttttgtagaatctgcaagaggatatttggatagctttgaggatttcttgggaaacgggaatgtcttcagataaactctagacagaagcattctcagaaacttctttgggatgtttcaattgaagtcacagtgttgaacattccctttcacagagcaggtttgaaacactctttttgtagtgtctataagtgaacatttggcgtgctttcaggcctaacgtgaaaaaggaaatatcttcccataaaaactagacagaagcattctcagaaacttgttcgtgatgtgtgccctctactgacagagttgaacctttctttgcaaagagcagctttgaaacactctttttgtagaatctgcaagaggatatttggatagcttggaggatttcgttggaaacgggtatgtcttcagataaactctagacagaagcattctcagaaacttctttgggatgttgcattcaagtcacagagtagaacattcccattcatagagcagatttgaaacactctttttgtagtatctggaagtggacatttggagcgctttcaggcctatgctgaaaaaggaaatatcttcccataaaaactagacggaagcattctcagaaacttatttgtgatgtgtttgctcaactaacaggattgaaccatcgttttgaaggagcagttttgaaacactgttttcgtggaatctgcaagtggatatttggctagctttgaggatttcgttggaaacgggattacatataaaaaggagacagcagcattctcagaaacttctttgtgatgtttgcattcaagtcacagagttgaacattccctttcatagagcaggtttgaaacactctttttgtagtatctggatgtggacatttggatcgctttcaggcctatggtgaaaaaggaaatatcttcccatgaaaactagacagaagcattctcagaaatttatttgtgatgtgtgccctcaactaacagagttgaacctttcttttgatagagcagttttgaaacactctttttgtaaaatctgcaagaggatatttggatagctttgaggatttcgttgcaaacgggaatggcttcatataaactctagacagaagcattctcagaaacttcgttgggatgtttcgattgaagtcccagtgttgaacattcccttttatagagcaggttggaaacactctttctgcattccctggaagtggacatttggagcgctttcaggacgacggtgaaaatggaaatatcttccaagaaaatctagatagaagcaacgtcagaaacttttctgtgatggatctactcagctaacagagttgaacctttcttttgagagagcagttttgcaacactctttttgtggaatatgcaagtggatattagggcagctttgaggatttcgttggaaacgggaatacatgtaaaaagcagacagcagcattctcagaaacttctttgtgatgtttgcattgaagtcacagagttgaacattccctttgagagagcaggtttgaaacacgccttttgtcatatctggaagtgtccattcggagcgcattcaggcttgtgttgaaaaaggaaatatcctcccataaaaactagacagaagcattctcagaaacttatctgtgatgtatgtactcaactaacagaactaaaccatcgttttgaaggagcagttttgaaacactctttttgcggaatctgcaagtggatatttggctagctgggaggatttcgttggaaacgggattacatacaaaaagcagacagcagcattctcagaaacttatttgtgatgtgtgccctcaactgacagtgctgaacctttgttttgatagagcagttctgaaacacactttttgtaaaatctgcaagaggatatttggatagctttgaggatttcgttggaaacgggaatgtcttcatgtaaactctagacagaagcattctcagaaactgctttgggatgtttcaattgaagtcccagtgttgaacattcccattcatagagcaggtttgaaacactctttttgtactatctggaagtggacatttggagcgctttcaggtctacggtgaaaaaggagatatcttccaataaaaactagatagaagcaatgtcagaacttttttcatgatgtatctactcagcaaacagagttgaacctttcttttgagagagcagttttgaaacactctttttgtggaatatgcaagtgggtattaggccagcttggaggatttcgttggaaacgggaatacgtataaaaagcagacagcagcattgtcagaaactactttgtgatgtttgcattcaagtcacagaattgaacactccctttcacagggcaggtttgaaacactctttttgtagtgtctgtaagtgaacatttggattgctttcaggcctaaggtgaaaaaggaaatatcttcccataaaaactagacagaagcattctcagaaacttgtttgtgatgtgtgccctctactgacagagttgaacctttctttgcaaagaccagttttgaaacactctttttgtagaatctgcaagaggatatttggatagctttgaggatttcttgggaaacgggaatgtcttcagataaactctagacagaagcattctcagaaacttctttgggatgtttcaattgaagtcacagtgttgaacattccctttcacagagcaggtttgaaacactctttttgtagtgtctataagtgaacatttggcgtgctttcaggcctaacgtgaaaaaggaaatatcttcccataaaaactagacagaagcattctcagaaacttgttcttgatgtgtcccctctactgacagagttgaacctttctttgcaaagagcagctttgaaacactctttttgtagaatctgcaagaggatatttggatagcttggaggatttcgttggaaacgggtatgtcttcagataaactctagacagaagcattctcagaaacttatttgggatgttgcattcaagtcacagagtagaacattcccattcatagagcagatttgaaacactctttttgtagtatctggaagtggacatttggagcgctttcaggcctatgttgaaaaaggaaatatcttcccataaaaactagacggaagcattctcagaaacttaattgtgatgtgtttgctcaactaacaggattgaaccatcgttttgaaggagcagttttgaaacactgttttcgtggaatctgcaagtggatatttggctagctttgaggatttcgttggaaacgggattacatataaaaaggagacagcagcattctcagaaacttctttgtgatgtttgcattcaagtcacagagttgaacattccctttcatagagcaggtttgaaacactctttttgtagtatctggatgtggacatttggatcgctttcaggcctatggtgaaaaaggaaatatcttcccatgaaaactagacagaagcattctcagaagtttatttgtgatgtgtgccctcaactaacagagttgaacctttcttttgatagagcagttttgaaacactctttttgtaaaatctgcaagaggatatttggatagctttgaggatttcgttggaaacgggaatgtcttcatgtaaactctagacagaagcattctcagaaacttcgttgggatgtttcgattgaagtcccagtgttgaacattcccttttatagagcaggttggaaacactctttctgcattccctggaagtggacatttggagcgctttcaggacgacggtgaaaatggaaatatcttccaagaaaatctagatagaagcaacgtcagaaacttttctgtgatggatctactcagctaacagagttgaacctttcttttgagagagcagttttgcaacactctttttgtggaatatgcaagtggatattagggcagctttgaggatttcgttggaaacgggaatacatgtaaaaagcagacagcagcattctcagaaacttctttgtgatgtttgcattgaagtcacagagttgaacattccctttgagagagcaggtttgcaacacgccttttgtcatatctggaagtgtccattcggagcgcattcaggcttgtgttgaaaaaggaaatatcctcccataaaaactagacagaagcattctcagaaacttatctgtgatgtatgtactcaactaacagcaactaaaccatcgttttgaaggagcagttttgaaacactctttttgcggaatctgcaagtggatatttggctagctgggaggatttcgttggaaacgggattacatacaaaaagcagacagcagcattctcagaaacttatttgtgatgtgtgccctcaactgacagtgttgaacctttgttttgatagagcagttctgaaacacactttttgtaaaatctgcaagaggatatttggatagctttgaggatttcgttggaaacgggaatgtcttcatgtaaactctagacagaagcattctcagaaactgctttgggatgtttcaattgaagtcccagtgttgaacattcccattcatagagcaggtttgaaacactctttttgtactatctggaagtggacatttggagcgctttcaggtctacggtgaaaaaggagatatcttccaataaaaactagatagaagcaatgtcagaacttttttcatgatgtatctactcagctaacagagttgaacctttcttttgagagagcagttttgaaacactctttttgtggaatatgcaagtgggtattaggccagcttggaggatttcgttggaaacgggaatacgtataaaaagcagacagcagcattgtcagaaactactttgtgatgtttgcattcaagtcacagaattgaacactccctttcacagagcaggtttgaaacactctttttgtagtgtctgtaagtgaacatttggattgctttcaggcctaaggtgaaaaaggaaatatcttcccataaaaactagacagaagcattctcagaaacttgtttgtgatgtgtgccctctactgacagagttgaacctttctttgcaaagagcagttttgaaacactcttttgtagaatctgcaagaggatatttggatagctttgaggatttcttgggaaacgggaatgtcttcagataaactctagacagaagcattctcagaaacttctttgggatgtttcaattgaagtcagtgttgaacattccctttcacagagcaggtttgaaacactctttttgtagtgtctataagtgaacatttggcgtgctttcaggcctaacgtgaaaaaggaaatatcttcccataaaaactagacagaagcattctcagaaacttgttcatgatgtgtgccctctactgacagagttgaacctttctttgcaaagagcagctttgaaacactctttttgtagaatctgcaagaggatatttggatagcttggaggatttcgttggaaacgggtatgtcttcagataaactctagacagaagcattctcagaaacttctttgggatgttgcattcaagtcacagagtagaacattcccattcatagagcagatttgaaacactctttttgtagtatctggaagtggacatttggagcgctttcaggcctatgttgaaaaaggaaatatcttcccataaaaactagacggaagcattctcagaaacttatttgtgatgtgtttgctcaactaacaggattgaaccatcgttttgaaggagcagttttgaaacactgttttcgtggaatctgcaagtggatatttggctagctttgaggatttcgttggaaacgggattacatataaaaaggagacagcagcattctcagaaacttctttgtgatgttggcattcaagtcacagagttgaacattccctttcatagagcaggtttgaaacactctttttgtagtatctggatgtggacatttggatcgctttcaggcctatggtgaaaaaggaaatatcttcccatgaaaactagacagaagcattctcagaaatttatttgtgatgtgtgccctcaactaacagagttgaacctttcttttgatagagcagttttgaaacactctttttgtaaaatctgcaagaggatatttggatagctttgaggatttcattgcaaacgggaatggcttcatataaactctagacagaagcattctcagaaacttcgttgggatgtttcgattgaagtcccagtgttgaacattcccttttacagagcaggttggaaacactctttttgcattccctggaagtggacatttggagcgctttcaggacgacggtgaaaatggaaatatcttccaataaaatctagatagagaagcaatgtcagaaacttttatgtgatggatctactcagctaacagagttgaacctttcttttgagagagcagttttgcaacactctttttgtggaatatgcaagtggatattagggcagctttgaggatttcgttggaaacgggaatacatgtaaaaagcagacagcagcattctcagaaacttctttgtgatgtttgcattgaagtcacagagttgaacattccctttgagagagcaggtttgaaacacgccttttgtcatatctggaagtgtccattcggagcgcattcaggcttgtgttgaaaaaggaaatatcctcccataaaaactagacagaagcattctcagaaacttatctgtgatgtatgtactcaactaacagaactaaaccatcgttttgaaggagcagttttgaaacactctttttgcggaatctgcaagtggatatttggctagctgggaggatttcgttggaaacgggattacatacaaaaagcagacagcagcattctcagaaacttatttgtgatgtgtgccctcaactgacagtgttgaacctttgttttgatagagcagttctgaaacacactttttgtaaaatctgcaagaggatatttggatagctttgaggatttcgttggaaacgggaatgtcttcatgtaaactctagacagaagcattctcagaaactgctttgggatgtttcaattgaagtcccagtgttgaacattcccattcatagagcaggtttgaaacactctttttgtgctatctggaagtggacatttggagcgctttcaggtctacggtgaaaaaggagatatcttccaataaaaactagatagaagcaatgtcagaacttttttcatgatgtatctactcagcaaacagagttgaacctttcttttgagagagcagttttgaaacactctttttgtggaatatgcaagtgggtattaggccagcttggaggatttcgttggaaacgggaatactgtataaaaagcagacagcagcattgtcagaaactactttgtgatgtttgcattcaagtcacagaattgaacactccctttcacagagcaggtttgaaacactctttttgtagtgtctgtaagtgaacatttggattgctttcaggcctaaggtgaaaaaggaaatatcttcccataaaaactagacagaagcattctcagaaacttgtttgtgatgtgtgccctctactgacagagttgaacctttccttgcaaagagcagttttgaaacactctttttgtagaatctgcaagaggatatttggatagctttgaggatttcttgggaaacgggaatgtcttcagataaactctagacagaagcattctcagaaacttctttgggatgtttcaattgaagtcacagtgttgaacattctctttcacagagcaggtttgaaacactctttttgtagtgtctataagtgaacatttggcgtgctttcaggcctaacgtgaaaaaggaaatatcttcccataaaaactagacagaagcattctcagaaacttgtttgtgatgtgtgccctctactgacagagttgaacctttctttgcaaagagcagctttgaaacactctttttgtagaatctgcaagaggatatttggatagctttgaggatttcgttggaaacgggtatgtcttcagataaactctagacagaagcattctcagaaacttctttgggatgttgcattcaagtcacagagtagaacattcccattcatagagcagatttgaaacactctttttgtagtatctggaagtggacatttggagcgctttcaggcctatgttgaaaaaggaaatatcttcccataaaaactagacggaagcattctcagaaacttatttgtgatgtgtttgctcaactaacaggattgaaccatcgttttgaaggagcagttttgaaacactgttttcgtggaatctgcaagtggatatttggctagctttgaggatttcgttggaaacgggattacatataaaaaggagacagcagcattctcagaaacttctttgtgatgtttgcattcaagtcacagagttgaacattccctttcatagagcaggtttgaaacactctttttgtagtatctggatgtggacatttggatcgctttcaggcctatggtgaaaaaggaaatatcttcccatgaaaactagacagaagcattctcagaaatttatttgtgatgtgtgccctcaactaacagagttgaacctttcttttgatagagcagttttgaaacactctttttgtaaaatctgcaagaggatatttggatagctttgaggatttcgttgcaaacgggaatggcttcatataaactctagacagaagcattctcagaaacttcgttgggatgtttcgattgaagtcccagtgttgaacattcccttttatagagcaggttggaaacactctttctgcattccctggaagtggacatttggagcgctttcaggacgacggtgaaaatggaaatatcttccaagaaaatctagatagaagcaacgtcagaaacttttctgtgatggatctactcagctaacagagttgaacctttcttttgagagagcagttttgcaacactctttttgtggaatatgcaagtggatattagggcagctttgaggatttcgttggaaacgggaatacatgtaaaaagcagacagcagcattctcagaaacttctttgtgatgtttgcattgaagtcacagagttgaacattccctttgagagagcaggtttgaaacacgccttttgtcatatctggaagtgtccattcggagcgcattcaggcttgtgttgaaaaaggaaatatcctcccagaaaaactagacagaagcattctcagaaacttatctgtgatgtatgtactcaactaacagcaactaaaccatcgttttgaaggagcagttttgaaacactctttttgcggaatctgcaagtggatatttggctagctgggaggatttcgttggaaacgggattacatacaaaaagcagacagcagcattctcagaaacttatttgtgatgtgtgccctcaactgacagtgttgaacctttgttttgatagagcagttctgaaacacactttttgtaaaatctgcaagaggatatttggatagctttgaggatttcgttggaaacgggaatgtcttcatgtaaactctagacagaagcattctcagaaactgctttgggatgtttcaattgaagtcccagtgttgaacattccctttcatagagcagggttgaaacactctttttgtactatctggaagtggacatttggagcgctttcaggtctacggtgaaaaaggagatatcttccaataaaaactagatagaagcaatgtcagaacttttttcatgatgtatctactcagcaaacagagttgaacctttcttttgagagagcagttttgaaacactctttttgtggaatatgcaagtgggtattaggccagcttggaggatttcgttggaaacgggaatacgtataaaaagcagacagcagcattgtcagaaactactttgtgatgtttgcattcaagtcacagaattgaacactccctttcacagagcaggtttgaaacactctttttgtagtgtctgtaagtgaacatttggattgctttcaggcctaaggtgaaaaaggaaatatcttcccataaaaactagacagaagcattctcagaaacttgtttgtgatgtgtgccctctactgacagagttgaacctttctttgcaaagaccagttttgaaacactctttttgtagaatctgcaagaggatatttggatagctttgaggatttcttgggaaacgggaatgtcttcagataaactctagacagaagcattctcagaaacttctttgggatgtttcaattgaagtcacagtgttgaacattccctttcacagagcaggtttgaaacactctttttgtagtgtctataattgaacatttggcgtgctttcaggcctaacgtgaaaaaggaaatatcttcccataaaaactagacagaagcattctcagaaacttgttcgtgatgtgtgccctctactgacagagttgaacctttctttgcaaagagcagctttgaaacactctttttgtagaatctgcaagaggatatgtggatagctttgaggatttcgttggaaacgggtatgtcttcagataaactctagacagaagcattctcagaaacttctttgggatgttgcattcaagtcacagagtagaacattcccattcatagagcagatttgaaacactctttttgtagtatctggaagtggacatttggagcgctttcaggcctatgttgaaaaaggaaatatcttcccataaaaactagacggaagcattctcagaaacttacttgtgatgtgtttgctcaactaacagaattgaaccatcgttttgaaggagcagttttgaaacactgttttcgtggaatctgcaagtggatatttggctagctttgaggatttcgttggaaacgggattacatataaaaaggagacagcagcattctcagaaacttctttgtgatgtctgcattcaagtcacagagttgagcattccctttcatagagcaggttggaaacactctttttgtagtatctggatgaggacatttggagcgctttcaggcgtatggtgaaaaaggaaatatcttcccgtaaaaactagacagaagcattctcagaaatttatttgtgatgtgtgccctcaactaacagagttgaacctttcttttgatagagcagttttgaaacactctttttgtaaaatctgcaagaggatatttggatagctttgaggatttcgttgcaaacgggaatggcttcatataaactctagacagaagcattctcagaaacttcgttgggatgtttcgattgaagtcccagtgttgaacattcccttttatagagcaggttggaaacactctttctgcattccctggaagtggacatttggagcgctttcaggacgacggtgaaaatggaaatatcttccaagaaaatctagatagaagcaatgtcagaaacttttatgtgatggatctactcagctaacagagttgaacctttcttttgagagagcagttttgcaacactctttttgtggaatatgcaagtggatattagggcagctttgaggatttcgttggaaacgggaatacatgtaaaaagcagacagcagcattctcagcaaacttctttgtgatgtttgcattgaagtcacagagttgaacattccctttgagagagcaggtttgcaacacgccttttgtcatatctggaagtgtccattcggagcgcattcaggcttgtgttgaaaaaggaaatatcctcccataaaaactagacagaagcattctcagaaacttatctgtgatgtatgtactcaactaaccgaactaaaccatcgttttgaaggagcagttttgaaacactctttttgcggaatctgcaagtggatatttggctagctgggaggatttcgttggaaacgggattacatacaaaaagcagacagcagcattctcagaaacttatttgtgatgtgtgccctcaactgacagtgttgaacctttgttttgatagagcagttctgaaacacactttttgtaaaatctgcaagaggatatttggatagctttgaggatttcgttggaaacgggaatgtcttcatgtaaactctacacagaagcattctcagaaactgctttgggatgtttcaattgaagtcccagtgttgaacattcccattcatagagcaggtttgaaacactctttttgtactatctggaagtggacatttggagcgctttcaggtctacggtgaaaaaggagatatcttccaataaaaactagatagaagcaatgtcagaacttttttcatgatgtatctactcagcaaacagagttgaacctttcttttgagagagccgttttgaaacactctttttgtggaatatgcaagtgggtattaggccagcttggaggatttcgttggaaacgggaatacgtataaaaagcagacagcagcattgtcagaaactactttgtgatgtttgcattcaagtcacagaactgaacactccctttcacagagcaggtttgaaacactctttttgtagtgtctgtaagtgaacatttggattgctttcaggcctaaggtgaaaaaggaaatatcttcccataaaaactagacagaagcattctcagaaacttgtttgtgatgtgtgccctctactgacagagttgaacctttctttgcaaagagcagttttgaaacactctttttgtagaatctgcaagaggatatttggatagctttgaggatttcttgggaaacgggaatgtcttcagataaactctagacagaagcattctcagaaacttctttgggatgtttcaattgaagtcacagtgttgaacattccctttcacagagcaggtttgaaacactctttttgtagtgtctataagtgaacatttggcgtgctttcaggcctaacgtgaaaaaggaaatatcttcccataaaaactagacagaagcattctcagaaacttgtttgtgatgtgtgccctctactgacagagttgaacctttctttgcaaagagcagctttgaaacactctttttgtagaatctgcaagaggatatttggatagctttgaggatttcgttggaaacgggtatgtcttcagataaactctagacagaagcattctcagaaacttctttgggatgttgcattcaagtcacagagtagaacattcccattcatagagcagatttgaaacactctttttgtagtatctggaagtggacatttggagcgctttcaggcctatgttgaaaaaggaaatatcttcccataaaaactacacggaagcattctcagaaacttatttgtgatgtgtttgctcaactaacaggattgaaccatcgttttgaaggagcagttttgaaacactgttttcgtggaatctgcaagtggatatttggctagctttgaggatttcgttggaaacgggattacatataaaaaggagacagcagcattctcagaaacttctttgtgatgtctgcattcaagtcacagagttgagcattccctttcatagagaaggttggaaacactctttttgtagtatctggatgaggacatttggagcgctttcaggcgtatggtgaaaaaggaaatatcttcccgtaaaaactagacagaagcattctcagaagtttatttgtgatgtgtgccctcaactaacagagttgaacctttcttttgatagagcagttttgaaacactctttttgtaaaatctgcaagaggatatttggatagctttgaggatttcgttgcaaacgggaatggcttcatataaactctagacagaagcattctcagaaacttcgttgggatgtttcgattgaagtcccagtgttgaacattcccttttatagagcaggttggaaacactctttctgcattccctggaagtggacatttggagcgctttcaggacgacggtgaaaatggaaatatcttccaagaaaatctagatagaagcaacgtcagaaacttttctgtgatggatctactcagctaacagagttgaacctttcttttgagagagcagttttgcaacactctttttgtggaatatgcaagtggatattagggcagctttgaggatttcgttggaaacgggaatacatgtaaaaagcagacagcagcattctcagaaacttctttgtgatgtttgcattgaagtcacagagttgaacatcccctttgagagagcaggtttgaaacacgccttttgtcatatctggaagtgtccattcggagcgcattcaggcttgtgttgaaaaaggaaatatcctcccataaaaactagacagaagcattctcagaaacttatctgtgatgtatgtactcaactaacagaactaaaccatcgttttgaagggcagttttgaaacactctttttgcggaatctgcaagtggatatttggctagctgggaggatttcgttggaaacgggattacatacaaaaagcagacagcagcattctcagaaacttatttgtgatgtgtgccctcaactgacagtgttgaacctttgttttgatagagcagttctgaaacacactttttgtaaaatctgcaagaggatatttggatagctttgaggatttcgttggaaacgggaatgtcttcatgtaaactctggacagaagcattctcagaaacttcgttgggatgtttcgattgaagtcccagtgttgaacattcccattcatagagcaggtttgaaactctctttctgtactatctggaagtggacatttggagcgctttcaggtctacggtgaaaaaggagatatcttccaataaaaactagatagaagcaatgtcagaaactttatcatgatgtatctactcagccaacagagttgaacctttcttttgagagagcagttttgaaacactctttttgtgcaatatgcaattgggtattaggccagcttggaggatttcgttggaaacgggaatacgtataaaaagcagacagcagcattgtcagaaactactttgtgatgtttgcattcaagtcacagaattgaacactccctttcacagagcaggtttgaaacactctttttgtagtgtctgtaagtgaacatttggattgctttcaggcctaaggtgaaaaaggaaatatcttcccataaaaactagacagtagcattctcagaaacttgtgtgtgatgtgtgccctctactgacagagttgaacctttcattgcaaagagcagttttgaaacccactttttgtagaatctgcaagaggatatttggatagatttgaggatttcttgggaaacgggaatgtcttcagataaactctagacagaagcattctcagaaacttctttgggatgtttcaattgaagtcacagtgttgaacattccctttcacagagcaggtttgaaacactctttttgtagtgtctataagtgaacatttggcgtgctttcaggcctaacgtgaaaaaggaaatatcttcccataaaaactagacagaagcattctcagaaacttgttcgtgatgtgtgccctctactgacagagttgaacctttctttgcaaagagcagctttgaaacactctttttgtagaatctgcaagaggatatttggatagctttgaggatttcgttggaaacgggtatgtcttcagataaactctagacagaagcattctcagaaacttctttgggatgttgcattcaagtcacagagtagaacattcccattcatagagcagatttgaaacactctttttgtagtatctggaagtggacatttggagcgctttcaggcctatgttgaaaaaggaaatatcttcccataaaaactagacggaagcattctcagaaacttatttgtgatgtgtttgctcaactaacaggattgaaccatcgttttgaaggagcagttttgaaacactgttttcgtggaatctgcaagtggatatttggctagctttgaggatttcgttggaaacgggattacatatacaaaggagacagcagcattctcagaaacttctttgtgatgtctgcattcaattcacagagttgagcattccctttcatagagcaggttggaaacactctttttgtagtatctggatgaggacatttggagcgctttcaggcctatggtgaaaaaggaaatatcttcccgtaaaaactagacagaagcattctcagaagtttatttgtgatgtgtgccctcaactaacagagttgaacctttcttttgatagagcagttttgaaacactctttttgtaaaatctgcaagaggatatttggatagctttgaggatttcgttgcaaacgggaatggcttcatataaactctagacagaagcattctcagaaacttcgttgggatgtttcgattgaagtcccagtgttgaacattcccttttatagagcaggttggaaacactctttctgcattccctggaagtggacatttggagcgctttcaggacgacggtgaaaatggaaatatcttccaagaaaatctagatagaagcaacgtcagaaacttttatgtgatggatctactcagctaacagagttgaacctttcttttgagagagcagttttgcaacactctttttgtggaatatgcaagtggatattagggcagctttgaggatttcgttggaaacgggaatacatgtaaaaagcagacagcagcattctcagaaacttctttgtgatgtttgcattgaagtcacagagttgaacattccctttgagagagcaggtttgaaacacgccttttgtcatatctggaggtgtccattcggagcgcattcaggcttgtgttgaaaaaggaaatatcctcccataaaaactagacagaagcattctcagaaacttatttgtgatgtatgtactcaactaacagaactaaaccatcgttttgaaggagcagttttgaaacactctttttgcggaatctgcaactggatatttggctagcttggaggatttcgttggaaacgggattacatacaaaaagcagacagcagcattctcagaaacttatttgtgatgtgtgccctcaactgacagtgttgaacctttgttttgatagagcagttctgaaacacactttttgtaaaatctgcaagaggatatttggatagctttgaggatttcgttggaaacgggaatgtcttcatgtaaactctacacagaagcattctcagaaactgctttgggatgtttcaattgaagtcccagtgttgaacattcccattcatagagcaggtttgaagcactctttttgtactatctggaagtggacatttggagcgctttcaggtctacggtgaaaaaggagatatcttccaataaaaactagatagaagcaatgtcagaacttttttcatgatgtatctactcagcaaacagagttgaacctttcttttgagagagcagttttgaaacactctttttgtggaatatgcaagtgggtattaggccagcttggaggatttcgttggaaacgggaatacgtataaaaagcagacagcagcattgtcagaaactactttgtgatgtttgcattcaagtcacagaattgaacactccctttcacagagcaggtttgaaacactctttttgtagtgtctgtaagtgaacatttggattgatttcaggcctaaggtgaaaaaggaaatatcttcccataaaaactagacagaagcattctcagaaacttgtttgtgatgtgtgccctctactgacagagttgaacctttctttgcaaagagcagttttgaaacactctttttgtagaatctgcaagaggatatttggatagctttgaagatttcttgggaaacgggaatgtcttcagataaactctagacagaagcattctcagaaacttctttgggatgtttcaattgaagtcacagtgttgaacattccctttcacagagcaggtttgaaacactctttttgtagtgtctataagtgaacatttggcgtgctttcaggcgtaacgtgaaaaaggaaatatcttcccataaaaaccagacagaagcattctcagaaacttgttcgtgatgtgtgccctctactgacagagttgaacctttctttgcaaagagcagctttgaaacacactttttgtagaatctgcaagaggatattttaatagctttgaggatttcgttggaaacgggtatgtcttcagataaactctagacagaagcattctcagaaacttctttgggatgttgcattcaagtcacagagtagaacattcccattcatagagcagatttgaaacactctttttgtagtatctggaagtggacatttggagcgctttcaggcctatgttgaaaaaggaaatatcttcccataaaaactagacggaagcattctcagaaacttacttgtgatgtgtttgctcaactaacagaattgaaccatcgttttgaaggagcagttttgaaacactgttttcgtggaatctgcaagtggatatttggctagctttgaggatttcgttggaaacgggattacatataaaaaggagacagcagcattctcagaaacttctttgtgatgtctgcattcaattcacagagttgagcattccctttcatagagcaggttggaaacactctttttgtagtatctggatgaggacatttggagcgctttcaggcgtatggtgaaaaaggaaatatcttcccgtaaaaactagacagaagcattctcagaaatttatttgtgatgtgtgccctcaactaacagagttgaacctttcttttgatagagcagttttgaaacactctttttgtaaaatctgcaagaggatatttggatagctttgaggatttcgttgcaaacgggaatggcttcatataaactctagacagaagcattctcagaaacttcgttgggatgtttcgattgaagtcccagtgttgaacattcccttttatagagcaggttggaaacactctttctgcattccctggaagtggacatttggagcgctttcaggacgacggtgaaaatggaaatatcttccaagaaaatctagatagaagcaacgtcagaaacttttctgtgatggatctactcagctaacagagttgaacctttcttttgagagagcagttttgcaacactctttttgtggaatatgcaagtggatattagggcagctttgaggatttcgttggaaacgggaatacatgtaaaaagcagacagcagcattctcagaaacttctttgtgatgtttgcattgaagtcacagagttgaacattccctttgagagagcaggtttgaaacacgccttttgtcatatctggaagtgtccattcggagcgcattcaggcttgtgttgaaaaaggaaatatcctcccataaaaactagacagaagcattctcagaaacttatctgtgatgtatgtactcaactaacagaactaaaccatcgttttgaaggagcagttttgaaacactctttttgcggaatctgcaagtggatatttggctagctgggaggatttcgttggaaacgggattacatacaaaaagcagacagcagcattctcagaaacttatttgtgatgtgtgccctcaactgacagtgttgaacctttgttttgatagagcagttctgaaacacactttttgtaaaatctgcaagaggatatttggatagctttgaggatttcgttggaaacgggaatgtcttcatgtaaactctacacagaagcattctcagaaactgctttgggatgtttcaattgaagtcccagtgttgaacattcccattcatagagcaggtttgaaacactctttttgtactatctggaagtggacatttggagcgctttcaggtctacggtgaaaaaggagatatcttccaataaaaactagatagaagcaatgtcagaacttttttcatgatgtatctattcagcaaacagagttgaacctttcttttgagagagcagttttgaaacactctttttgtggaatatgcaagtgggtattaggccagcttggaggatttctttggaaacgggaatacgtataaaaagcagacagcagcattgtcagaaactactttgtgatgtttgcatgcaagtcacagaatggaacactgcctttcacagagcaggtttgaaacactctttttgtagtgtctgtaagtgaacatttggattgctttcaggcctaaggtgaaaaaggaaatatcttcccataaaaactagacagaagcattctcagaaacttgtttgtgatgtgtgccctctactgacagagttgaacctttctttgcaaagagcagttttgaaacactctttttgtagaatctgcaagaggatatttggatagctttgaggatttcttgggaaacgggaatgtcttcagataaactctagacagaagcattctcagaaacttctttgggatgtttcaattgaagtcacagtgttgaacattccctttcacagagcaggtttgaaacactctttttgtagtgtctataagtgaacatttggcgtgctttcaggcctaacgtgaaaaaggaaatatcttcccataaaaactagacagaagcattctcagaaacttgttcatgatgtgtgccctctactgacagagttgaacctttctttgcaaagagcagctttgaaacactctttttgtagaatctgcaagaggatatttggatagctttgaggatttcgttggaaacgggtatgtcttcagataaactctagacagaagcattctcagaaacttctttgggatgttgcattcaagtcacagagtagaacattcccattcatagagcagatttgaaacactctttttgtagtatctggaagtggacatttggagcgctttcaggcctatgttgaaaaaggaaatatcttcccataaaaactagacggaagcattctcagaaacttacttgtgatgtgtttgctcaactaacagaattgaaccatcgttttgaaggagcagttttgaaacactgttttcgtggaatctgcaagtggatatttggctagctttgaggatttcgttggaaacgggattacatataaaaaggagacagcagcattctcagaaacttctttgtgatgtttgcattcaagtcacagagttgaacattccctttcatagagcaggtttgaaacactctttttgtagtatctggatgtggacatttggatcgctttcaggcctatggtgaaaaaggaaatatcttcccatgaaaactagacagaagcattctcagaaatttatttgtgatgtgtgccctcaactaacagagttgaacctttcttttgatagagcagttttgaaacactctttttgtaaaatctgcaagaggatatttggatagctttgaggatttcattgcaaacgggaatggcttcatataaactctagacagaagcattctcagaaacttcgttgggatgtttcgattgaagtcccagtgttgaacattcccttttatagagcaggttggaaacactctttctgcattccctggaagtggacatttggagcgctttcaggacgacggtgaaaatggaaatatcttccaagaaaatctagatagaagcaacgtcagaaacttttctgtgatggatctactcagctaacagagttgaacctttcttttgagagagcagttttgcaacactctttttgtggaatatgcaagtggatattagggcagctttgaggatttcgttggaaacgggaatacatgtaaaaagcagacagcagcattctcagaaacttctttgtgatgtttgcattgaagtcacagagttgaacattccctttgaggagcaggtttgaaacacgccttttgtcatatctggaagtgtccattcggagcgcattcaggcttgtgttgaaaaagaaaatatcctcccataaaaactagacagaagcattctcagcaaacttatctgtgatgtatgtactcaactaacagaactaaaccatcgttttgaaggagcagttttgaaacactctttttgcggaatctgcaagtggatatttggctagctgggaggatttcgttggaaacgggattacatacaaaaagcagacagcagcattctcagaaacttatttgtgatgtgtgccctcaactgacagtgttgaacctttgttttgatagagcagttctgaaacacactttttgtaaaatctgcaagaggatatttggatagctttgaggatttcgttggaaacgggaatgtcttcatgtaaactctagacagaagcattctcagaaactgctttgggatgtttcaattgaagtcccagtgttgaacattccctttcatagagcaggtttgaaacactctttttgtactatctggaagtggacatttggagcgctttcaggtctacggtgaaaaaggagatatcttccaataaaaactagatagaagcaatgtcagaacttttttcatgatgtatctactcagcaaacagagttgaacctttcttttgagagagcagttttgaaacactctttttgtggaatatgcaagtgggtattaggccagcttggaggatttcgttggaaacgggaatacgtataaaaagcagacagcagcattgtcagaaactactttgtgatgtttgcattcaagtcacagaattgaacactccctttcacagtagcaggtttgaaacactctttttgtagtgtctgtaagtgaacatttggattgctttcaggcctaaggtgaaaaaggaaatatcttcccataaaaactagacagaagcattctcagaaacttgtttgtgatgtgtgccctctactgacagagttgaacctttctttgcaaagagcagttttgaaacactctttttgtagaatctgcaagaggatatttggatagctttgaggatttcttgggaaacgggaatgtcttcagataaactctagacagaagcattctcagaaacttctttgggatgtttcaattgaagtcacagtgttgaacattccctttcacagagcaggtttgaaacactctttttgtagtgtctataagtgaacatttggcgtgctttcaggcctaacgtgaaaaaggaaatatcttcccataaaaactagacagaagcattctcagaaacttgttcgtgatgtgtgccctctactgacagagttgaacctttctttacaaagagcagctttgaaacacactttttgtagaatctgcaagaggatatttggatagctttgaggatttcgttggaaacgggtatgtcttcagataaactctagacagaagcattctcagaaacttctttgggatgttgcattcaagtcacagagtagaacattcccattcatagagcagatttgaaacactctttttgtagtatctggaagtggacatttggagcgctttcaggcctatgttgaaaaaggaaatatcttcccataaaaactagacggaagcattctcagaaacttatttgtgatgtgtttgctcaactaacaggattgaaccatcgttttgaaggagcagttttgaaacactgttttcgtggaatctgcaagtggatatttggctagcttgaggatttcgttggaaacgggattacatataaaaaggagacagcagcattctcagaaacttctttgtgatgtctgcattcaattcacagagttgagcattccctttcatagagcaggttggaaacactctttttgtagtatctggatgaggacatttggagcgctttcaggcgtatggtgaaaaaggaaatatcttcccgtaaaaactagacagaagcattctcagaaatttatttgtgatgtgtgccctcaactaacagagttgaacctttcttttgatagagcagttttgaaacactctttttgtaaaatctgcaagaggatatttggatagctttgaggatttcgttgcaaacgggaatggcttcatataaactctagacagaagcattctcagaaacttcgttgggatgtttcgattgaagtcccagtgttgaacattcccttttatagagcaggttggaaacactctttctgctttccctggaagtggacatttggagcgctttcaggacgacggtgaaaatggaaatatcttccaagaaaatctagatagaagcaatgtcagaaacttttatgtgatggatctactcagctaacagagttgaacctttcttttgagagagcagttttgcaacactctttttgtggaatatgcaagtggatattagggcagctttgaggatttcgttggaaacgggaatacatgtaaaaagcagacagcagcattctcagaaacttctttgtgatgtttgcattgaagtcacagagttgaacattccctttgagagagcaggtttgaaacacgccttttgtcatatctggaagtgtccattcggagcgcattcaggcttgtgttgaaaaaggaaatatcctcccataaaaactagacagaagcattctcagaaacttatctgtgatgtatgtactcaactaacagaactaaaccatcgttttgaaggagcagttttgaaacactctttttgcggaatctgcaagtggatatttggctagctgggaggatttcgttggaaacgggattacatacaaaaagcagagagcagcattctcagaaacttatttgtgatgtgtgccctcaactgacagtgttgaacctttgttttgatagagcagttctgaaacacactttttgtaaaatctgcaagaggatatttggatagctttgaggatttcgttggaaacgggaatgtcttcatgtaaactctacacagaagcattctcagaaactgctttgggatgtttcaattgaagtcccagtgttgaacattcccattcatagagcaggtttgaaacactctttttgtactatctggaagtggacatttggagcgctttcaggtctacggtgaaaaaggagatatcttccaataaaaactagatagaagcaatgtcagaacttttttcatgatgtatctactcagcaaacagagttgaacctttcttttgagagagcagttttgaaacactctttttgtggaatatgaaagtgggtattaggccagcttggaggatttcgttggaaacgggaatacgtataaaaagcagacagcagcattgtcagaaactactttgtgatgtttgcattcaagtcacagaattgaacactccctttcacagagcaggtttgaaacactctttttgtagtgtctgtaagtgaacatatggattgctttcaggcctaaggtgaaaaaggaaatatcttcccataaaaactagacagaagcattctcagaaacttgtttgtgatgtgtgccctctactgacagagttgaacctttctttgcaaagagcagttttgaaacactctttttgtagaatctgcaagaggatatttggatagctttgaggatttcttgggaaacgggaatgtcttcagataaactctagacagaagcattctcagaaacttctttgggatgtttcaattgaagtcacagtgttgaacattccctttcacagagcaggtttgaaacactctttttgtagtgtctataagtgaacatttggcgtgctttcaggcctaacgtgaaaaaggaaatatcttcccataaaaactagacagaagcattctcagaaacttgttcgtgatgtgtgccctctactgacagagttgaacctttctttgcaaagagcagctttgaaacactctttttgtagaatctgcaagaggatatttggatagctttgaggatttcgttggaaacgggtatgtcttcagataaactctagacagaagcattctcagaaacttctttgggatgttgcattcaagtcacagagtagaacattcccattcatagagcagatttgaaacactctttttgtagtatctggaagtggacatttggagcgctttcaggcctatgttgaaaaaggaaatatcttcccataaaaactagacggaagcattctcagaaacttacttgtgatgtgtttgctcaactaacagaattgaaccatcgttttgaaggagcagttttgaaacactgttttcgtggaatctgcaagtggatatttggctagctttgaggatttcgttggaaacgggattacatataaaaaggagacagcagcattctcagaaacttctttgtgatgtctgcattcaattcacagcagttgagcattccctttcatagagcaggttggaaacactctttttgtagtatctggatgaggacatttggagcgctttcaggcgtatggtgaaaaaggaaatatcttcccgtaaaaactagacagaagcattctcagaagtttatttgtgatgtgtgccctcaactaacagagttgaacctttcttttgatagagcagttttgaaacactctttttgtaaaatctgcaagaggatatttggatagctttgaggatttcgttgcaaacgggaatggcttcatataaactctagacagaagcattctcagaaacttcgttgggatgtttcgattgaagtcccagtgttgaacattcccttttatagagcaggttggaaacactctttctgcattccctggaagtggacatttggagcgctttcaggacgacggtgaaaatggaaatatcttccaagaaaatctagatagaagcaatgtcagaaacttttatgtgatggatctactcagctaacagagttgaacctttcttttgagagagcagttttgcaacactctttttgtggaatatgcaagtggatattagggcagctttgaggatttcgttggaaacgggaatacatgtaaaaagcagacagcagcattctcagaaacttctttgtgatgtttgcattgaagtcacagagttgaacattccctttgagagagcaggtttgaaacacgccttttgtcatatctggaagtgtccattcggagcgcattcaggcttgtgttgaaaaaggaaatatcctcccagaaaaactagacagaagcattctcagaaacttatctgtgatgtatgtactcaactaacagaactaaaccatcgttttgaaggagcagttttgaaacactctttttgcggaatctgcaagtggatatttggctagctgggaggatttcgttggaaacgggattacatacaaaaagcagacagcagcattctcagaaacttatttgtgatgtgtgccctcaactgacagtgttgaacctttgttttgatagagcagttctgaaacacactttttgtaaaatctgcaagaggatatttggatagctttgaggatttcgttggaaacgggaatgtcttcatgtaaactctacacagaagcattctcagaaactgctttgggatgtttcaattgaagtcccagtgttgaacattccctttcatagagcaggtttgaaacactctttttgtactatctggaagtggacattcggagcgctttcaggtctacggtgaaaaaggagatatcttccaataaaaactagatagaagcaatgtcagaacttttttcatgatgtatctactcagcaaacagagttgaacctttcttttgagagagcagttttgaaacactctttttgtggaatatgcaagtgggtattaggccagcttggaggatttcgttggaaacgggaatacgtataaaaagcagacagcagcattgtcagaaactactttgtgatgtttgcattcaagtcacagaattgaacactccctttcacagagcaggtttgaaacactctttttgtagtgtctgtaagtgaacatatggattgctttcaggcctaaggtgaaaaaggaaatatcttcccataaaaactagacagaagcattctcagaaacttgtttgtgatgtgtgccctctactgacagagttgaacctttctttgcaaagagcagttttgaaacactctttttgtagaatctgcaagaggatatttggatagctttgaggatttcttgggaaacgggaatgtcttcagataaactctagacagaagcattctcagaaacttctttgggatgtttcaattgaagtcacagtgttgaacattccctttcacagagcaggtttgaaacactctttttgtagtgtctataagtgaacatttggcgtgctttcaggcctaacgtgaaaaaggaaatatcttcccataaaaactagacagaagcattctcagaaacttgttcgtgatgtgtgccctctactgacagagttgaacctttctttgcaaagagcagctttgaaacactctttttgtagaatctgcaagaggatatttggatagctttgaggatttcgttggaaacgggtatgtcttcagataaactctagacagaagcattctcagaaacttctttgggatgttgcattcaagtcacagagtagaacattcccattcatagagcagatttgaaacactctttttgtagtatctggaagtggacatttggagcgctttcaggcctatgttgaaaaaggaaatatcttcccataaaaactagacggaagcattctcagaaacttatttgtgatgtgtttgctcaactaacaggattgaaccatcgttttgaaggagcagttttgaaacactgttttcatggaatctgcaagtggatatttggctagctttgaggatttcgttggaaacgggattacatataaaaaggagacagcaagcattctcagaaacttctttgtgatgtttgcattcaagtcacagagttgaacattccctttcatagagcaggtttgaaacactctttttgtagtatctggatgtggacatttggatcgctttcaggcctatggtgaaaaaggaaatatcttcccatgaaaactagacagaagcattctcagaagtttatttgtgatgtgtgccctcaactaacagagttgaacctttcttttgatagagcagttttgaaacactctttttgtaaaatctgcaagaggatatttggatagctttgaggatttcgttgcaaacgggaatggcttcatataaactctagacagaagcattctcagaaacttcgttgggatgtttcgattgaagtcccagtgttgaacattcccttttatagagcaggttggaaacactctttctgcattccctggaagtggacatttggagcgctttcaggacgacggtgaaaatggaaatatcttccaagaaaatctagatagaagcaatgtcagaaacttttatgtgatggatctactcagctaacagagttgaacctttcttttgagagagcagttttgcaacactctttttgtggaatatgcaagtggatattagggcagctttgaggatttcgttggaaacgggaatacatgtaaaaagcagacagcagcattctcagaaacttctttgtgatgtttgcattgaagtcacagagttgaacattccctttgagagagcaggtttgaaacacgccttttgtcatatctggaagtgtccattcggagcgcattcaggcttgtgttgaaaaaggaaatatcctcccataaaaactagacagaagcattctcagaaacttatctgtgatgtatgtactcaactaacagaactaaaccatcgttttgaaggagcagttttgaaacactctttttgcggaatctgcaagtggatatttggctagctgggaggatttcgttggaaacgggattacatacaaaaagcagacagcagcattctcagaaacttatttgtgatgtgtgccctcaactgacagtgttgaacctttgttttgatagagcagttctgaaacacactttttgtaaaatctgcaagaggatatttggatagctttgaggatttcgttggaaacgggaatgtcttcatgtaaactctagacagaagcattctcagaaactgctttgggatgtttcaattgaagtcccagtgttgaacattccctttcatagagcaggtttgaaacactctttttgtactatctggaagtggacatttggagcgctttcaggtctacggtgaaaaaggagatatcttccaataaaaactagatagaagcaatgtcagaacttttttcatgatgtatctactcagctaacagagttgaacctttcttttgagagagcagttttgaaacactctttttgtggaatatgcaagagggtattaggccagcttggaggatttcgttggaaacgggaatacgtataaaaagcagacagcagcattgtcagaaactactttgtgatgtttgcattcaagtcacagaattgaacactccctttcacagagcaggtttgaaacactctttttgtagtgtctgtaagtgaacatttggattgctttcaggcctaaggtgaaaaaggaaatatcttcccataaaaactagacagaagcattctcagaaacttgtttgtgatgtgtgccctctactgacagagttgaacctttctttgcaaagagcagttttgaaacactctttttgtagaatctgcaagaggatatttggatagctttgaggatttcttgggaaacgggaatgtcttcagataaactctagacagaagcattctcagaaacttctttgggatgtttcaattgaagtcacagtgttgaacattccctttcacagagcaggtttgaaacactctttttgtagtgtctataagtgaacatttggcgtgctttcaggcgtaacgtgaaaaaggaaatatcttcccataaaaaccagacagaagcattctcagaaacttgttcttgatgtgtcccctctactgacagagttgaacctttctttgcaaagagcagctttgaaacactctttttgtagaatctgcaagaggatatttggatagcttggaggatttcgttggaaacgggtatgtcttcagataaactctagacagaagcattctcagaaacttctttgggatgttgcattcaagtcacagagtagaacattcccattcatagagcagatttgaaacactctttttgtagtatctggaagtggacatttggagcgctttcaggcgtatgttgaaaaaggaaatatcttcccataaaaactagacggaagcattctcagaaacttacttgtgatgtgtttgctcaactaacagaattgaaccatcgttttgaaggagcagttttgaaacactgttttcgtggaatctgcaagtggatatttggctagctttgaggatttcgttggaaacgggattacatataaaaaggagacagcagcattctcagaaacttctttgtgatgtctgcattcaattcacagagttgagcattccctttcatagagcaggttggaaacactctttttgtagtatctggatgaggacatttggagcgctttcaggcgtatggtgaaaaaggaaatatcttcccgtaaaaactagacagaagcattctcagaaatttatttgtgatgtgtgccctcaactaacagagttgaacctttcttttgatagagcagttttgaaacactctttttgtaaaatctgcaagaggatatttggatagctttgaggatttcattgcaaacgggaatggcttcatataaactctagacagaagcattctcagaaacttcgttgggatgtttcgattgaagtcccagtgttgaacattcccttttatagagcaggttggaaacactctttctgcattccctggaagtggacatttggagcgctttcaggacgacggtgaaaatggaaatatcttccaagaaaatctagatagaagcaacgtcagaaacttttatgtaatggatctactcagctaacagagttgaacctttcttttgagagagcagttttgcaacactctttttgtggaatatgcaagtggatattagggcagctttgaggatttcgttggaaacgggaatacatgtaaaaagcagacagcagcattctcagaaacttctttgtgatgtttgcattgaagtcacagagttgaacattccctttgagagagcaggtttgaaacacgccttttgtcatatctggaagtgtccattcggagcgcattcaggcttgtgttgaaaaaggaaatatcctcccataaaaactagacagaagcattctcagaaacttatctgtgatgtatgtactcaactaacagaactaaaccatcgttttgaaggagcagttttgaaacactctttttgcggaatctgcaagtggatatttggctagctgggaggatttcgttggaaacgggattacatacaaaaagcagacagcagcattctcagaaacttatttgtgatgtgtgccctcaactgacagtgttgaacctttgttttgatagagcagttctgaaacacactttttgtaaaatctgcaagaggatatttggatagctttgaggatttcgttggaaacgggaatgtcttcatgtaaactctacacagaagcattctcagaaactgctttgggatgtttcaattgaagtcccagtgttgaacattcccattcatagagcaggtttgaaacactctttttgtactatctggaagtggacatttggagcgctttcaggtctacggtgaaaaaggagatatcttccaataaaaactagatagaagcaatgtcagaacttttttcatgatgtatctactcagcaaacagagttgaacctttcttttgagagagcagttttgaaacactctttttgtggaatatgcaagtgggtattaggccagcttggaggatttcgttggaaacgggaatacgtataaaaagcagacagcagcattgtcagaaactactttgtgatgtttgcattcaagtcacagaattgaacactccctttcacagagcaggtttgaaacactctttttgtagtgtctgtaagtgaacatatggattgctttcaggcctaaggtgaaaaaggaaatatcttcccataaaaactagacagaagcattctcagaaacttgtttgtgatgtgtgccctctactgacagagttgaacctttctttgcaaagagcagttttgaaacactctttttgtagaatctgcaagaggatatttggatagctttgaagatttcttgggaaacgggaatgtcttcagataaactctagacagaagcattctcagaaacttctttgggatgtttcaattgaagtcacagtgttgaacattccctttcacagagcaggtttgaaacactctttttgtagtgtctataagtgaacatttggcgtgctttcaggcctaacgtgaaaaaggaaatatcttcccataaaaactagacagaagcattctcagaaacttgttcttgatgtgtcccctctactgacagagttgaacctttctttgcaaagagcagctttgaaacactctttttgtagaatctgcaagaggatatttggatagcttggaggatttcgttggaaacgggtatgtcttcagataaactctagacagaagcattctcagaaacttctttgggatgttgcattcaagtcacagagtagaacattcccattcatagagcagatttgaaacactctttttgtagtatctggaagtggacatttggagcgctttcaggcctatgttgaaaaaggaaatatcttcccataaaaactagacggaagcattctcagaaacttatttgtgatgtgtttgctcaactaacaggattgaaccatcgttttgaaggagcagttttgaaacactgttttcgtggaatctgcaagtggatatttggctagctttgaggatttcgttggaaacgggattacatatacaaaggagacagcagcattctcagaaacttctttgtgatgtctgcattcaattcacagagttgagcattccctttcatagagcaggttggaaacactctttttgtagtatctggatgaggacatttggagcgctttcaggcgtatggtgagaaaggaaatatcttcccgtaaaaactagacagaagcattctcagaagtttatttgtgatgtgtgccctcaactaacagagttgaacctttcttttgatagagcagttttgaaacactctttttgtaaaatctgcaagaggatatttggatagctttgaggatttcgttgcaaacgggaatggcttcatataaactctagacagaagcattctcagaaacttcgttgggatgtttcgattgaagtcccagtgttgaacattcccttttatagagcaggttggaaacactctttctgcattccctggaagtggacatttggagcgctttcaggacgacggtgaaaatggaaatatcttccaagaaaatctagatagaagcaatgtcagaaacttttctgtgatggatctactcagctaacagagttgaacctttcttttgagagagcagttttgcaacactctttttgtggaatatgcaagtggatattagggcagctttgaggatttcgttggaaacgggaatacatgtaaaaagcagacagcagcattctcagaaacttctttgtgatgtttgcattgaagtcacagagttgaacattccctttgagagagcaggtttgaaacacgccttttgtcatatctggaagtgtccattcggagcgcattcaggcttgtgttgaaaaaggaaatatcctcccataaaaactagacagaagcattctcagaaacttatctgtgatgtatgtactcaactaacagaactaaaccatcgttttgaaggagcagttttgaaacactctttttgcggaatctgcaagtggatatttggctagctgggaggatttcgttggaaacgggattacatacaaaaagcagacagcagcattctcagaaacttatttgtgatgtgtgccctcaactgacagtgttgaacctttgttttgatagagcagttctgaaacacactttttgtaaaatctgcaagaggatatttggatagctttgaggatttcgttggaaacgggaatgtcttcatgtaaactctacacagaagcattctcagaaactgctttgggatgtttcaattgaagtcccagtgttgaacattccctttcatagagcaggtttgaaacactctttttgtactatctggaagtggacatttggagcgctttcaggtctacggtgaaaaaggagatatcttccaataaaaactagatagaagcaatgtcagaacttttttcatgatgtatctactcagctaacagagttgaacctttcttttgagagagcagttttgaaacactctttttgtggaatatgcaagtgggtattaggccagcttggaggatttcgttggaaacgggaatacgtataaaaagcagacagcagcattgtcagaaactactttgtgatgtttgcattcaagtcacagaattgaacactccctttcacagagcaggtttgaaacactctttttgtagtgtctgtaagtgaacatttggattgctttcaggcctaaggtgaaaaaggaaatatcttcccataaaaactagacagaagcattctcagaaacttgtttgtgatgtgtgccctctactgacagagttgaacctttctttgcaaagagcagttttgaaacactctttttgtagaatctgcaagaggatatttggatagctttgaggatttcttgggaaacgggaatgtcttcagataaactctagacagaagcattctcagaaacttctttgggatgtttcaattgaagtcacagtgttgaacattccctttcacagagcaggtttgaaacactctttttgtagtgtctataattgaacatttggcgtgctttcaggcctaacgtgaaaaaggaaatatcttcccataaaaactagacagaagcattctcagaaacttgttcgtgatgtgtgccctctactgacagagttgaacctttctttgcaaagagcagctttgaaacactctttttgtagaatctgcaagaggatatttggatagcttggaggatttcgttggaaacgggtatgtcttcagataaactatagacagaagcattctcagaaacttctttgggatgttgcatgcaagtcacagagtagaacattcccattcatagagcagatttgaaacactctttttgtagtatctggaagtggacatttggagcgctttcaggcctatgttgaaaaaggaaatatcttcccataaaaactagacggaagcattctcagaaacttatttgtgatgtgtttgctcaactaacaggattgaaccatcgttttgaaggagcagttttgaaacactgttttcgtggaatctgcaagtggatatttggctagctttgaggatttcgttggaaacgggattacatataaaaaggagacagcagcattctcagaaacttctttgtgatgtttgcattcaagtcacagagttgaacattccctttcatagagcaggtttgaaacactctttttgtagtatctggatgtggacatttggatcgctttcaggcctatggtgaaaaaggaaatatcttcccatgaaaactagacagaagcattctcagaagtttatttgtgatgtgtgccctcaactaacagagttgaacctttcttttgatagagcagttttgaaacactctttttgtaaaatctgcaagaggatatttggatagctttgaggatttcgttgcaaacgggaatggcttcatataaactctagacagaagcattctcagaaacttcgttgggatgtttcgattgaagtcccagtgttgaacattcccttttatagagcaggttggaaacactctttctgcattccctggaagtggacatttggagcgctttcaggacgacggtgaaaatggaaatatcttccaagaaaatctagatagaagcaacgtcagaaacttttctgtgatggatctactcagctaacagagttgaacctttcttttgagagagcagttttgcaacactctttttgtggaatatgcaagtggatattagggcagctttgaggatttcgttggaaacgggaatacatgtaaaaagcagacagcagcattctcagaaacttctttgtgatgtttgcattgaagtcacagagttgaacattccctttgagagagcaggtttgaaacacgccttttgtcatatctggaagtgtccattcggagcgcattcaggcttgtgttgaaaaaggaaatatcctcccataaaaactagacagaagcattctcagaaacttatctgtgatgtatgtactcaactaacagaactaaaccatcgttttgaaggagcagttttgaaacactctttttgcggaatctgcaagtggatatttggctagctgggaggatttcgttggaaacgggattacatacaaaaagcagacagcagcattctcagaaacttatttgtgatgtgtgccctcaactgacagtgttgaacctttgttttgatagagcagttctgaaacacactttttgtaaaatctgcaagaggatatttggatagctttgaggatttcgttggaaacgggaatgtcttcatgtaaactctagacagaagcattctcagaaactgctttgggatgtttcaattgaagtcccagtgttgaacattccctttcatagagcaggtttgaaacactctttttgtactatctggaagtggacatttggagcgctttcaggtctacggtgaaaaaggagatatcttccaataaaaactagatagataagcaatgtcagaacttttttcatgatgtatctactcagcaaacagagttgaacctttcttttgagagagcagttttgaaacactctttttgtggaatatgcaagtgggtattaggccagcttggaggatttcgttggaaacgggaatacgtataaaaagcagacagcagcattgtcagaaactactttgtgatgtttgcattcaagtcacagaattgaacactccctttcacagagcaggtttgaaacactctttttgtagtgtctgtaagtgaacatttggattgctttcaggcctaaggtgaaaaaggaaatatcttcccataaaaactagacagaagcattctcagaaacttgtttgtgatgtgtgccctctactgacagagttgaacctttctttgcaaagagcagttttgaaacactctttttgtagaatctgcaagaggatatttggatagctttgaggatttcttgggaaacgggaatgtcttcagataaactctagacagaaagcattctcagaaacttctttgggatgtttcaattgaagtcacagtgttgaacattccctttcacagagcaggtttgaaacactctttttgtagtgtctataagtgaacatttggcgtgctttcaggcgtaacgtgaaaaaggaaatatcttcccataaaaactagacagaaagcattctcagaaacttgttcgtgatgtgtgccctctactgacagagttgaacctttctttgcaaagagcagctttgaaacactctttttgtagaatctgcaagaggatatttggatagctttgaggatttcgttggaaacgggtatgtcttcagataaactctagacagaagcattctcagaaacttctttgggatgttgcattcaagtcacagagtagaacattcccattcatagagcagatttgaaacactctttttgtagtatctggaagtggacatttggagcgctttcaggcctatgttgaaaaaggaaatatcttcccataaaaactagacggaagcattctcagaaacttatttgtgatgtgtttgctcaactaacaggattgaaccatcgttttgaaggagcagttttgaaacactgttttcgtggaatctgcaagtggatatttggctagctttgaggatttcgttggaaacgggattacatatacaaaggagacagcagcattctcagaaacttctttgtgatgtctgcattcaattcacagagttgagcattccctttcatagagcaggttggaaacactctttttgtagtatctggatgaggacatttggagcgctttcaggcctatggtgaaaaaggaaatatcttcccgtaaaaactagacagaagcattctcagaaatttatttgtgatgtgtgccctcaactaacagagttgaacctttcttttgatagagcagttttgaaagactctttttgtaaaatctgcaagaggatatttggatagctttgaggatttcgttgcaaacgggaatggcttcatataaactctagacagaagcattctcagaaacttcgttgggatgtttcgattgaagtcccagtgttgaacattcccttttatagagcaggttggaaacactctttctgcattccctggaagtggacaattggagcgcattcaggacgacggtgaaaatggaaatatcttccaagaaaatctagatagaagcaacgtcagaaacttttctgtgatggaactactcagctaacagagttgaacctttcttttgagagagcagttttgcaacactctttttgtggaatatgcaagtggatattaaggcagctttgaggatttcgttggaaacgggaatacatgtaaaaagcagacagcagcattctcagaaacttctttgtgatgtttgcattgaagtcacagagttgaacattccctttgagagagcaggtttgaaacacgccttttgtcatatctggaagtgtccattcggagcgcattcaggcttgtgttgaaaaaggaaatatcctcccagaaaaactagacagaagcattctcagaaacttatctgtgatgtatgtactcaactaacagaactaaaccatcgttttgaaggagcagttttgaaacactctttttgcggaatctgcaagtggatatttggctagctgggaggatttcgttggaaacgggattacatacaaaaagcagacagcagcattctcagaaacttatttgtgatgtgtgccctcaactgacagtgttgaacctttgttttgatagagcagttctgaaacacactttttgtaaaatctgcaagaggatatttggataactttgaggatttcgttggaaacgggaatgtcttcatgtaaactctagacagaagcattctcagaaactgctttgggatgtttcaattgaagacccagtgttgaacattcccattcatagagcaggtttgaaacactctttttgtactatctggaagtggacatttggagcgctttcaggtctgcggtgaaaaaggagatatcttccaataaaaactagatagaagcaatgtcagaacttttttcatgatgtatctactcagctaacagagttgaacctttcttttgagagagcaggtttgaaacactctttttgtggaatatgcaagtgggtattaggccagcttggaggatttcgttggaaacgggaatacgtataaaaagcagacagcagcattgtcagaaactactttgtgatgtttgcattcaagtcacagaattgaacactccctttcacagagcaggtttgaaacactctttttgtagtgtctgtaagtgaacatatggattgctttcaggcctaaggtgaaaaaggaaatatcttcccataaaaactagacagaaagcattctcagaaacttgtttgtgatgtgtgccctctactgacagatttgaacctttctttgcaaagagcagctttgaaacactctttttgtagaatctgcaagaggatatttggatagctttgaggatttcgttggaaacgggtatgtcttcagataaactctagacagaagcattctcagaaacttctttgggatgtttcaattgaagtcacagtgttgaacattccctttcacagagcaggtttgaaacactctttttgtagtgtctataagtgaacatttggcgtgctttcaggcctaacgtgaaaaaggaaatatcttcccataaaaactagacagaagcattctcagtaacttgttcttgatgtgtcccctctactgacagagttgaacctttctttgcaaagagcagctttgaaacactctttttgtagaatctgcaagaggatatttggatagcttggaggatttcgttggaaacgggtatgtcttcagataaactctagacagaagcattctcagaaacttctttgggatgttgcattcaagtcacagagtagaacattcccattcatagagcagatttgaaacactctttttgtagtatctggaagtggacatttggagcgctttcaggcctatgttgaaaaaggaaatatcttcccataaaaactagacggaagcattctcagaaacttaattgtgatgtgtttgctcaactaacaggattgaaccatcgttttgaaggagcagttttgaaacactgttttcgtggaatctgcaagtggatatttggctagctttgaggatttcgttggaaacgggattacatataaaaaggagacagcagcattctcagaaacttctttgtgatgtctgcattcaattcacagagttgagcattccctttcatagagcaggttggaaacactctttttgtagtatctggatgaggacatttggagcgctttcaggcgtatggtgaaaagggaaatatcttcccgtaaaaactagacagaagcattctcagaaatttatttgtgatgtgtgccctcaactaacagagttgaacctttcttttgatacagcagttttgaaacactctttttgtaaaatctgcaagaggatatttggatagctttgaggatttcgttgcaaacgggaatggcttcatataaactctagacagaagcattctcagaaacttcgttgggatgtttcgattgaagtcccagtgttgaacattcccttttatagagcaggttggaaacactctttctgcattccctggaagtggacatttggagcgctttcaggacgacggtgaaaatggaaatatcttccaagaaaatctagatagaagcaacgtcagaaacttttctgtgatggatctactcagctaacagagttgaacctttcttttgagagagcagttttgcaacactctttttgtggaatatgcaagtggatattagggcagctttgaggatttcgttggaaacgggaatacatgtaaaaagcagacagcagcattctcagaaacttctttgtgatgtttgcattgaagtcacagagttgaacattccctttgagagagcaggtttgaaacacgccttttgtcatatctggaagtgtccattcggagcgcattcaggcttgtgttgaaaaaggaaatatcctcccataaaaactagacagaagcattctcagaaacttatctgtgatgtatgtactcaactaacagaactaaaccatcgttttgaaggagcagttttgaaacactctttttgcggaatctgcaagtggatatttggctagctgggaggatttcgttggaaacgggattacatacaaaaagcagacagcagcattctcagaaacttatttgtgatgtgtgccctcaactgacagtgttgaacctttgttttgatagagcagttctgaaacacactttttgtaaaatctgcaagaggatatttggatagctttgaggatttcgttggaaacgggaatgtcttcatgtaaactctacacagaagcattctcagaaactgctttgggatgtttcaattgaagtcccagtgttgaacattccctttcatagagcaggtttgaaacactctttttgtactatctggaagtggacatttggagcgctttcaggtctacggtgaaaaaggagatatcttccaataaaaactagatagaagcaatgtcagaacttttttcatgatgtatctactcagcaaacagagttgaacctttcttttgagagagcagttttgaaacactccttttgtggaatatgcaagtgggtattaggccagcttggaggatttcgttggaaacgggaatacgtataaaaagcagacagcagcattgtcagaaactactttgtgatgtttgcattcaagtcacagaactgaacactccctttcacagagcaggtttgaaacactctttttgtagtgtctgtaagtgaacatttggattgctttcaggcctaaggtgaaaaaggaaatatcttcccataaaaactagacagaagcattctcagaaacttgtttgtgatgtgtgccctctactgacagagttgaacctttctttgcaaagagcagttttgaaacactctttttgtagaatctgcaagaggatatttggatagctttgaggatttcttgggaaacgggaatgtcttcagataaactctagacagaagcattctcagaaacttctttgggatgtttcaattgaagtcacagtgttgaacattccctttcacagagcaggtttgaaacactctttttgtagtgtctataagtgaacatttggcgtgctttcaggcctaacgtgaaaaaggaaatatcttcccataaaaactagacagaagcattctcagaaacttgttcgtgatgtgtgccctctactgacagagttgaacctttctttgcaaagagcagctttgaaacactctttttgtagaatctgcaagaggatatttggatagctttgaggatttcgttggaaacgggtatgtcttcagataaactctagacagaagcattctcagaaacttctgtgggatgttgcattcaagtcacagagtagaacattcccattcatagagcagatttgaaacactctttttgaagtatctggaagtggacatttggagcgctttcaggcctatgttgaaaaaggaaatatcttcccataaaaactagacggaagcattctcagaaacttatttgtgatgtgtttgctcaactaacaggattgaaccatcgttttgaaggagcagttttgaaacactgttttcgtggaatctgcaagtggatatttggctagctttgaggatttcgttggaaacgggattacatataaaaaggagacagcagcattctcagaaacttctttgtgatgtctgcattcaagtcacagagttgagcattccctttcatagagcaggttggaaacactctttttgtagtatctggatgaggacatttggagcgctttcaggcgtatggtgaaaaaggaaatatcttcccgtaaaaactagacagaagattctcagaaatttatttgtgatgtgtgccctcaactaacagagttgaacctttcttttgatagagcagttttgaaacactctttttgtaaaatctgcaagaggatatttggatagctttgaggatttcgttgcaaacgggaatggcttcatataaactctagacagaagcattctcagaaacttcgttgggatgtttcgattgaagtcccagtgttgaacattcccttttatagagcaggttggaaacactctttctgcattccctggaagtggacatttggagcgctttcaggacgacggtgaaaatggaaatatcttccaagaaaatctagatagaagcaatgtcagaaacttttatgtgatggatctactcagctaacagagttgaacctttcttttgagagagcagttttgcaacactctttttgtggaatatgcaagtggatattagggcagctttgaggatttcgttggaaacgggaatacatgtaaaaagcagacagcagcattctcagaaacttctttgtgatgtttgcattgaagtcacagagttgaacattccctttgagagagcaggtttgaaacacgccttttgtcatatctggaagtgtccattcggagcgcattcaggcttgtgttgaaaaaggaaatatcctcccataaaaactagacagaagcattctcagaaacttatctgtgatgtatgtactcaactaacagaactaaaccatcgttttgaaggagcagttttgaaacactctttttgcggaatctgcaagtggatatttggctagctgggaggatttcgttggaaacgggattacatacaaaaagcagacagcagcattctcagaaacttatttgcgatgtgtgccctcaactgacagtgttgaacctttgttttgatagagcagttctgaaacacactttttgtaaaatctgcaagaggatatttggatagctttgaggatttcgttggaaacgggaatgtcttcatgtaaactctggacagaagcattctcagaaactgctttgggatgtttcaattgaagtcccagtgttgaacattccctttcatagagcaggtttgaaacactctttttgtactatctggaagtggacatttggagcgctttcaggtctacggtgaaaaaggagatatcttccaataaaaactagatagaagcaatgtcagaacttttttcatgatgtatctactcagcaaacagagttgaaccttacttttgagagagcagttttgaaacactctttttgtggaatatgcaagtgggtattaggccagcttggaggatttcgttggaaacgggaatacgtataaaaagcagacagcagcattgtcagaaactactttgtgatgtttgcattcaagtcacagaattgaacactccctttcacagagcaggtttgaaacactctttttgtagtgtctgtaagtgaacatttggattgctttcaggcctaaggtgaaaaaggaaatatcttcccataaaaactagacagaagcattctcagaaacttgtttgtgatgtgtgccctctactgacagagttgaacctttctttgcaaagagcagttttgaaacactctttttgtagaatctgcaagaggatatttggatagctttgaagatttcttgggaaacgggaatgtcttcagataaactctagacagaagcattctcagaaacttctttgggatgtttcaattgaagtcacagtgttgaacattccctttcacagagcaggtttgaaacactctttttgtagtgtctataagtgaacatttggcgtgctttcaggcctaacgtgaaaaaggaaatatcttcccataaaaactagacagaagcattctcagaaacttgtttgtgatgtgtgccctctactgacagagttgaacctttctttgcaaagagcagctttgaaacactctttttgtagaatctgcaagaggatatgtggatagctttgaggatttcgttggaaacgggtatgtcttcagataaactctagacagaagcattctcagaaacttctttgggatgtttcaattgaagtcacagtgttgaacattccctttcacagagcaggtttgaaacactctttttgtagtgtctataagtgaacatttggcgtgctttcaggcctaacgtgaaaaaggaaatatcttcccataaaagctagacagaagcattctcagaaacttgttcatgatgtgtgccctctactgacagagttgaacctttttttgcaaagagcagctttgaaacactctttttgtagaatctgcaagaggatatttggatagcttggaggatttcgttggaaacgggtatgtcttcagataaactctagacagaagcattctcagaaacttctttgggatgttgcattcaagtcacagagtagaacattcccattcatagagcagatttgaaacactctttttgtagtatctggaagtggacatttggagcgctttcaggcctatgttgaaaaaggaaatatcttcccataaaaactagacggaagcattctcagaaacttacttgtgatgtgtttgctcaactaacagaattgaaccatcgttttgaaggagcagttttgaaacactgttttcgtggaatctgcaagtggatatttggctagctttgaggatttcgttggaaacgggattacatatacaaaggagacagcnnnnnnnnnnnnnnnnnnnnnnnnnnnnnnnnnnnnnnnnnnnnnnnnnnnnnnnnnnnnnnnnnnnnnnnnnnnnnnnnnnnnnnnnnnnnnnnnnnnncacgaaatcctccaagctggcctaatacccacttgcatattccacagaaagagtgtttcgaaactgctctctcaaaagaaaggttcaactctgtttgctgagtagatacatcatgaaaaaagttctgacattgcttctatctagtttttattggaagatatctcctttttcaccgtagacctgaaagcgctccaaatgtccacttccagatagtacaaaaagagtgtttcaaacctgctctatgaaagggaatgttcaacactgggacttcaattgaaacatcccaaagcagtttctgagaatgcttctgtctagagtttacatgaagacattcccgtttccaacgaaatcctcaaagctatccaaatatcctcttgcagattttacaaaaagtgtgtttcagaactgctctatcaaaacaaaggttcaacactgtcagttgagggcacacatcacaaataagtttctgagaatgcttctgtctagtttttatgggaagatatttcctttatcaccatacgcctgaaagcgatccaaatgtccacatccagatactacaaaaagagggtttcaaacctgctctatgaaagggaatgctcaaatctgtgacttgaatgcaaacatcacaaagaagtttctgagaatgctgctgtctcctttttatatgtaatcccttttccaatgaaatcctcaaagctagccaaatatccacttgcagattccacgaaaacagtgtttcaaaactgctccttcaaaacgatggttcaattctgttagttgagcaaacacatcacaagtaagtttctgagaatgcttccgtctagtttttatgggaagatatttcctttttcaacataggcctgaaagcgctccaaatgtccacttccagatactacaaaaagagtgtttcaaatctgctctatgaatgggaatgttctactctgtgacttgaatgcaacatcccaaagaagtttctgggaatgcttctgtctagagtttatctgaagacatacccgtttccaacgaaatcctcaaagctatccaaatatcctcttgcagattctacaaaaagagtgttccaaagctgctctttgcaaagaaaggttcaactctgtcagtagagggcacacatcacaaacaagtttctgagaatgcttctgtctagtttttatgggaagatatttcctttttcacgttaggcctgaaagcacgccaaatgttcacttatagacactacaaaaagagtgtttcaaacctgctctgtgaaagggaatgttcaacactgtgacttcaattgaaacatcccaaagaagtttctgagaatgcttctgtctagagtttatctgaagacattcccgtttcccaagaaatactcaaagctatccaaatatcgtcttgcagattctacaaaaagatggtttcaaaactgctcattgcaaagaaaggttcaactccgtcagtagagggcacacatcacaaacgagtttctgagaatgcttctgtcaagtttttatgggaagatatttcctttttcaccttagccctgaaagcaatccaaatgttcacttacagacactacaaaaagagtgtttcaaatctgctctgtgaaagggaatgttgaattctgtgacttgaatgcaaacatcacaaagaagtttctgacaacgctgctgtgtgcttttatacgtattcccgtttccaacgaaatcctccaagctgacctaatatccacttgcatattccacaaaaagagtgtttcaaaactgctctctcaaaagaaaggttcaactctgttggctgagtagatacatcatgataaagtttctgacattgcttttatctagtttttattggaagatatctcctttttcaccgtagacctgaaagcgctccaaatatccacttccagatacaacaaaaagagtgtttcaaatctgctgtatgaatgggaatgttctactctgtgacttgaatgcaacatcccaaagaagtttctgagaatgcttctgtctagagtttatctgaagacattcccgtttcccaagaaatcctcaaatctatccaaatatcctcttgcagattctacaaaaagtgggtttcaaaactgctctttgcaatgaaaggttcaactctgtcagtagagggcacacatcacacacaagtttctgagaatgctactgtctagtttttatgggaagatatttcctttttcaccttaggcctgaaagcaatccaaatgttcacttacagacactacaaaaagagtgtttcaaacctgctctgtgaaagggagtgttcaattctgtgacttgaatgcaaacatcacaaagtagtttctgacaatgctgctgtctgctttttatacgtattcccgtttccaacgaaatcctccaagctggcctaatacccaattgcatattgcacaaaaagagtgtttcaaaactgctctctcaaaagaaaggttcaactctgttggctgagtagatacatcatgataaagtttctgacattgcttctatctagtttttattggaagatatctgctttttcaccgtagacctgaaagccctacaaatgtccacttatagacactacaaaaagagtgtttcaaacctgctctatgaaagggagtgttcaacactgtgacttcaattgaaacatccgaaagcagtttctgagaatgcttctgtctagagtttacatgaagacattcccgtttccaacgaaatcctcaaagctatcccaatatcctcttgcagattttacaaaaagtgtgtttcagaactcctctatcaaaacaaaggttcaacactgtcagttgagggcacacatcacaaataagtttctgggaatgcttctgtctagttttcatgggaagatatttcctttttcaccataggcctgaaagcgatccaaatgtccacatccagatactacaaaaagagtgtttcaaacctcttctatgaaagggaatgttcaactctgtgacttgaatgcaaacatcacaaagaacttcatgagaattctgctgtctgctttttatatataatcctgtttccaacgaaatcctccaagctaggcaaatatccacttgcagattctgcaaaaagagtgtttcaacactgctccttcaaaacgatggtttagttctgttagttgagtacatacatcacaaataagtttctgagaatgcttctgtctagagtttatatgaagccattcccgtttgcaacgaaatcctcaaagctatccaaatatcctcttgcagattttacaaaaagagtgtttcaaaactgctctatcgaaagaaaggttcaactcggtttgttgatggcacacatcacaaataaatttctgagaatgcttctgtctagtttttacgggaagatatttcctttttcaccatacgcctgaaagcgctccaaatgtcctcatccagatactacaaatagagtgtttcaaacctgctctataaaaggaaatgctcaactctgtgacttgaatgcaacatcccaaagcagtttctgagaatgcttctgtctagagtttatctaaagacattcccgtttcccaagaaatactcaaagctatgcaaatatcctcttgcagattctacaaaaagagggtttcaaaactgctctttgcaaagaaaggttcaactctgtcagtagagggcacacatcacaaacacgtttttgataattcttctgtctagtttttatgggaagatatttcctttttacgttaggcctgaaagcacgccaaatattcacttagagacactacaaaaggagtgtttcaaacctgctctgtgaaacggaatgttcaacactgtgacttcaattgaaacatcccaaagaagtttctgagaatgcctctgtctagagtttatctgaagacattcccgtttcccaagaaatactcaaagctatccaaatatcctcttgtagattctaccaaaagaaggtttcaaaactgctctttgcaaagaaaggttcaactctgtcagtagagggcacacatcacaaacaagtttctgagaatgcttctgtctagtttttatgggaagatatgtcctttttcatgttaggcctgaaatcacgccaaatgttcacttagagacagtacaaaaagagtgtttcaaacctgctctgtgaaagggaatgttcaacactctgacttcaattgaaacatcccaaagaagtttctgagaatgctgctgtctagagtttatctgaagacattcccgtttcccaagaaatactcaaagctatccaaatatcctcttgcagattctacaaaaagatggtttcaaaactgctcattgcaaagaaaggttcaactccgtcagtagagggcacacatcacaaaagagtttctgagaatgcttctgtcaagtttttatgggaagatatttcctttttcaccttagccctgaaagcaatccaaatgttcacttacagacactacaaaaagagtgtttcaaatctgctctgtgaaagggagtgttgaattctgtgacttgaatgcaaacatcacaaagaagtttctgacaatgctgctgtgtgcttttatacgtattcccgtttccaacgaaatcctccaagctgacctaatatccacttgcatattccacaaaaagagtgattcaaaactgctctctcaaaagaaaggttcaactctgttggctgagtagatacatcatgataaagttctgacnnnnnnnnnnnnnnnnnnnnnnnnnnnnnnnnnnnnnnnnnnnnnnnnnnnnnnnnnnnnnnnnnnnnnnnnnnnnnnnnnnnnnnnnnnnnnnnnnnnnnnnnnnnnnnnnnnnnnnnnnnnnnnnnnnnnnnnnnnnnnnnnnnnnnnnnnnnnnnnnnnnnnnnnnnnnnnnnnnnnnnnnnnnnnnnnnnnnnnnnnnnnnnnnnnnnnnnnnnnnnnnnnnnnnnnnnnnnnnnnnnnnnnnnnnnnnnnnnnnnnnnnnnnnnnnnnnnnnnnnnnnnnnnnnnnnnnnnnnnnnnnnnnnnnnnnnnnnnnnnnnnnnnnnnnnnnnnnnnnnnnnnnnnnnnnnnnnnnnnnnnnnnnnnnnnnnnnnnnnnnnnnnnnnnnnnnnnnnnnnnnnnnnnnnnnnnnnnnnnnnnnnnnnnnnnnnnnnnnnnnnnnnnnnnnnnnnnnnnnnnnnnnnnnnnnnnnnnnnnnnnnnnnnnnnnnnnnnnnnnnnnnnnnnnnnnnnnnnnnnnnnnnnnnnnnnnnnnnnnnnnnnnnnnnnnnnnnnnnnnnnnnnnnnnnnnnnnnnnnnnnnnnnnnnnnnnnnnnnnnnnnnnnnnnnnnnnnnnnnnnnnnnnnnnnnnnnnnnnnnnnnnnnnnnnnnnnnnnnnnnnnnnnnnnnnnnnnnnnnnnnnnnnnnnnnnnnnnnnnnnnnnnnnnnnnnnnnnnnnnnnnnnnnnnnnnnnnnnnnnnnnnnnnnnnnnnnnnnnnnnnnnnnnnnnnnnnnnnnnnnnnnnnnnnnnnnnnnnnnnnnnnnnnnnnnnnnnnnnnnnnnnnnnnnnnnnnnnnnnnnnnnnnnnnnnnnnnnnnnnnnnnnnnnnnnnnnnnnnnnnnnnnnnnnnnnnnnnnnnnnnnnnnnnnnnnnnnnnnnnnnnnnnnnnnnnnnnnnnnnnnnnnnnnnnnnnnnnnnnnnnnnnnnnnnnnnnnnnnnnnnnnnnnnnnnnnnnnnnnnnnnnnnnnnnnnnnnnnnnnnnnnnnnnnnnnnnnnnnnnnnnnnnnnnnnnnnnnnnnnnnnnnnnnnnnnnnnnnnnnnnnnnnnnnnnnnnnnnnnnnnnnnnnnnnnnnnnnnnnnnnnnnnnnnnnnnnnnnnnnnnnnnnnnnnnnnnnnnnnnnnnnnnnnnnnnnnnnnnnnnnnnnnnnnnnnnnnnnnnnnnnnnnnnnnnnnnnnnnnnnnnnnnnnnnnnnnnnnnnnnnnnnnnnnnnnnnnnnnnnnnnnnnnnnnnnnnnnnnnnnnnnnnnnnnnnnnnnnnnnnnnnnnnnnnnnnnnnnnnnnnnnnnnnnnnnnnnnnnnnnnnnnnnnnnnnnnnnnnnnnnnnnnnnnnnnnnnnnnnnnnnnnnnnnnnnnnnnnnnnnnnnnnnnnnnnnnnnnnnnnnnnnnnnnnnnnnnnnnnnnnnnnnnnnnnnnnnnnnnnnnnnnnnnnnnnnnnnnnnnnnnnnnnnnnnnnnnnnnnnnnnnnnnnnnnnnnnnnnnnnnnnnnnnnnnnnnnnnnnnnnnnnnnnnnnnnnnnnnnnnnnnnnnnnnnnnnnnnnnnnnnnnnnnnnnnnnnnnnnnnnnnnnnnnnnnnnnnnnnnnnnnnnnnnnnnnnnnnnnnnnnnnnnnnnnnnnnnnnnnnnnnnnnnnnnnnnnnnnnnnnnnnnnnnnnnnnnnnnnnnnnnnnnnnnnnnnnnnnnnnnnnnnnnnnnnnnnnnnnnnnnnnnnnnnnnnnnnnnnnnnnnnnnnnnnnnnnnnnnnnnnnnnnnnnnnnnnnnnnnnnnnnnnnnnnnnnnnnnnnnnnnnnnnnnnnnnnnnnnnnnnnnnnnnnnnnnnnnnnnnnnnnnnnnnnnnnnnnnnnnnnnnnnnnnnnnnnnnnnnnnnnnnnnnnnnnnnnnnnnnnnnnnnnnnnnnnnnnnnnnnnnnnnnnnnnnnnnnnnnnnnnnnnnnnnnnnnnnnnnnnnnnnnnnnnnnnnnnnnnnnnnnnnnnnnnnnnnnnnnnnnnnnnnnnnnnnnnnnnnnnnnnnnnnnnnnnnnnnnnnnnnnnnnnnnnnnnnnnnnnnnnnnnnnnnnnnnnnnnnnnnnnnnnnnnnnnnnnnnnnnnnnnnnnnnnnnnnnnnnnnnnnnnnnnnnnnnnnnnnnnnnnnnnnnnnnnnnnnnnnnnnnnnnnnnnnnnnnnnnnnnnnnnnnnnnnnnnnnnnnnnnnnnnnnnnnnnnnnnnnnnnnnnnnnnnnnnnnnnnnnnnnnnnnnnnnnnnnnnnnnnnnnnnnnnnnnnnnnnnnnnnnnnnnnnnnnnnnnnnnnnnnnnnnnnnnnnnnnnnnnnnnnnnnnnnnnnnnnnnnnnnnnnnnnnnnnnnnnnnnnnnnnnnnnnnnnnnnnnnnnnnnnnnnnnnnnnnnnnnnnnnnnnnnnnnnnnnnnnnnnnnnnnnnnnnnnnnnnnnnnnnnnnnnnnnnnnnnnnnnnnnnnnnnnnnnnnnnnnnnnnnnnnnnnnnnnnnnnnnnnnnnnnnnnnnnnnnnnnnnnnnnnnnnnnnnnnnnnnnnnnnnnnnnnnnnnnnnnnnnnnnnnnnnnnnnnnnnnnnnnnnnnnnnnnnnnnnnnnnnnnnnnnnnnnnnnnnnnnnnnnnnnnnnnnnnnnnnnnnnnnnnnnnnnnnnnnnnnnnnnnnnnnnnnnnnnnnnnnnnnnnnnnnnnnnnnnnnnnnnnnnnnnnnnnnnnnnnnnnnnnnnnnnnnnnnnnnnnnnnnnnnnnnnnnnnnnnnnnnnnnnnnnnnnnnnnnnnnnnnnnnnnnnnnnnnnnnnnnnnnnnnnnnnnnnnnnnnnnnnnnnnnnnnnnnnnnnnnnnnnnnnnnnnnnnnnnnnnnnnnnnnnnnnnnnnnnnnnnnnnnnnnnnnnnnnnnnnnnnnnnnnnnnnnnnnnnnnnnnnnnnnnnnnnnnnnnnnnnnnnnnnnnnnnnnnnnnnnnnnnnnnnnnnnnnnnnnnnnnnnnnnnnnnnnnnnnnnnnnnnnnnnnnnnnnnnnnnnnnnnnnnnnnnnnnnnnnnnnnnnnnnnnnnnnnnnnnnnnnnnnnnnnnnnnnnnnnnnnnnnnnnnnnnnnnnnnnnnnnnnnnnnnnnnnnnnnnnnnnnnnnnnnnnnnnnnnnnnnnnnnnnnnnnnnnnnnnnnnnnnnnnnnnnnnnnnnnnnnnnnnnnnnnnnnnnnnnnnnnnnnnnnnnnnnnnnnnnnnnnnnnnnnnnnnnnnnnnnnnnnnnnnnnnnnnnnnnnnnnnnnnnnnnnnnnnnnnnnnnnnnnnnnnnnnnnnnnnnnnnnnnnnnnnnnnnnnnnnnnnnnnnnnnnnnnnnnnnnnnnnnnnnnnnnnnnnnnnnnnnnnnnnnnnnnnnnnnnnnnnnnnnnnnnnnnnnnnnnnnnnnnnnnnnnnnnnnnnnnnnnnnnnnnnnnnnnnnnnnnnnnnnnnnnnnnnnnnnnnnnnnnnnnnnnnnnnnnnnnnnnnnnnnnnnnnnnnnnnnnnnnnnnnnnnnnnnnnnnnnnnnnnnnnnnnnnnnnnnnnnnnnnnnnnnnnnnnnnnnnnnnnnnnnnnnnnnnnnnnnnnnnnnnnnnnnnnnnnnnnnnnnnnnnnnnnnnnnnnnnnnnnnnnnnnnnnnnnnnnnnnnnnnnnnnnnnnnnnnnnnnnnnnnnnnnnnnnnnnnnnnnnnnnnnnnnnnnnnnnnnnnnnnnnnnnnnnnnnnnnnnnnnnnnnnnnnnnnnnnnnnnnnnnnnnnnnnnnnnnnnnnnnnnnnnnnnnnnnnnnnnnnnnnnnnnnnnnnnnnnnnnnnnnnnnnnnnnnnnnnnnnnnnnnnnnnnnnnnnnnnnnnnnnnnnnnnnnnnnnnnnnnnnnnnnnnnnnnnnnnnnnnnnnnnnnnnnnnnnnnnnnnnnnnnnnnnnnnnnnnnnnnnnnnnnnnnnnnnnnnnnnnnnnnnnnnnnnnnnnnnnnnnnnnnnnnnnnnnnnnnnnnnnnnnnnnnnnnnnnnnnnnnnnnnnnnnnnnnnnnnnnnnnnnnnnnnnnnnnnnnnnnnnnnnnnnnnnnnnnnnnnnnnnnnnnnnnnnnnnnnnnnnnnnnnnnnnnnnnnnnnnnnnnnnnnnnnnnnnnnnnnnnnnnnnnnnnnnnnnnnnnnnnnnnnnnnnnnnnnnnnnnnnnnnnnnnnnnnnnnnnnnnnnnnnnnnnnnnnnnnnnnnnnnnnnnnnnnnnnnnnnnnnnnnnnnnnnnnnnnnnnnnnnnnnnnnnnnnnnnnnnnnnnnnnnnnnnnnnnnnnnnnnnnnnnnnnnnnnnnnnnnnnnnnnnnnnnnnnnnnnnnnnnnnnnnnnnnnnnnnnnnnnnnnnnnnnnnnnnnnnnnnnnnnnnnnnnnnnnnnnnnnnnnnnnnnnnnnnnnnnnnnnnnnnnnnnnnnnnnnnnnnnnnnnnnnnnnnnnnnnnnnnnnnnnnnnnnnnnnnnnnnnnnnnnnnnnnnnnnnnnnnnnnnnnnnnnnnnnnnnnnnnnnnnnnnnnnnnnnnnnnnnnnnnnnnnnnnnnnnnnnnnnnnnnnnnnnnnnnnnnnnnnnnnnnnnnnnnnnnnnnnnnnnnnnnnnnnnnnnnnnnnnnnnnnnnnnnnnnnnnnnnnnnnnnnnnnnnnnnnnnnnnnnnnnnnnnnnnnnnnnnnnnnnnnnnnnnnnnnnnnnnnnnnnnnnnnnnnnnnnnnnnnnnnnnnnnnnnnnnnnnnnnnnnnnnnnnnnnnnnnnnnnnnnnnnnnnnnnnnnnnnnnnnnnnnnnnnnnnnnnnnnnnnnnnnnnnnnnnnnnnnnnnnnnnnnnnnnnnnnnnnnnnnnnnnnnnnnnnnnnnnnnnnnnnnnnnnnnnnnnnnnnnnnnnnnnnnnnnnnnnnnnnnnnnnnnnnnnnnnnnnnnnnnnnnnnnnnnnnnnnnnnnnnnnnnnnnnnnnnnnnnnnnnnnnnnnnnnnnnnnnnnnnnnnnnnnnnnnnnnnnnnnnnnnnnnnnnnnnnnnnnnnnnnnnnnnnnnnnnnnnnnnnnnnnnnnnnnnnnnnnnnnnnnnnnnnnnnnnnnnnnnnnnnnnnnnnnnnnnnnnnnnnnnnnnnnnnnnnnnnnnnnnnnnnnnnnnnnnnnnnnnnnnnnnnnnnnnnnnnnnnnnnnnnnnnnnnnnnnnnnnnnnnnnnnnnnnnnnnnnnnnnnnnnnnnnnnnnnnnnnnnnnnnnnnnnnnnnnnnnnnnnnnnnnnnnnnnnnnnnnnnnnnnnnnnnnnnnnnnnnnnnnnnnnnnnnnnnnnnnnnnnnnnnnnnnnnnnnnnnnnnnnnnnnnnnnnnnnnnnnnnnnnnnnnnnnnnnnnnnnnnnnnnnnnnnnnnnnnnnnnnnnnnnnnnnnnnnnnnnnggagcgctttgaggcctgtggtcaaaaagaaatttcttcccataaaaactagacagaagcattctcagaaacttatttgtgatgtgtgtcctcaactgacagagttgaacatttcttttgagagagcagttttgaaacacctttttgtggaatctgcaagtggatatttggctggctttgacgatttccttggcaacgtgaatacatataaaaagcagacagcaccgttctgagaaacttcttggtgatgtttgcattaaagtcacagaatggaacgttccctttcatagaacaggtttgaaacaccacttttgtcgtatctggaagtgtccatttggagcgcattcaggcttgtgttgaaaaagtttatatcttcaaataaaaactagacagaagcattctcagaaacttgtttgtgatgtgtgccctctactaacagtgttgaacctttctcttcatagagcagttttgaaacactctttttgtagaatcagcaggaggatatttgcatagatttgaagatatcgttggaaacgggattgtgttcagataaaatccagacagaagcattctcagaaacttcttcgggatgtttgcattcaagtcacagaggagaacatgccctttcgtagagaaggtttgaaacactctttttatagtatctggaagtggacatatggagcagtttcaagacaatgttgaaaaaggaaatatcttctcgtaacaactggacagaagcatactcagaagctagtctttcatgtgtgccctcacctaacagagttcaacatttctttagacagaacagttttgaaacactctttttgtgcagtctgtaagtggatatttggctagatttgaggatttcgttggaaacgggattacgtataaaaagcagacaggagcattctcagaaacttctttgtgatgtttgcattcaagtcacagaattgaacattccctttcacagagcagttttgaaacactctttttgtagtgtctgtaagtggacgtttggagcgctttctggcctaaggtgaaaaaggacatatcttcccataaaaactagacagacgcattctcagaaacttactcgtgatgtgtgtcctcaactgacagagttgaacatttcttttgagagagcagttttgaaacactctttttgtggaatctgaaggggatatttggctggatttgacgatttcgttggaaacggtaatacatataaaaagcagacagcagcgttctgagaaacttcttggtgatttttgcattcaagtcacagaatggaacgttccctttcatagaacaggtttgaaaaactccttttgtcatctctggaggtgtccatttggagcgcactcaggcttgtgttgaaaaaggaaatatcttcccataaaaactagacagaagcattctcagcaacttgtttgtgatgtgtgccctcgactaacagaattgaaactttcttttcatagagcagttttgaaacactctttttgtagaatctgcaggaggatatttgcatagctttgaggatttccttgaaacgggattgtcttcagataaaatccagacagaagcattctcagaaacttctttgggatgtttgcattgacgtcacagaggagaacatgccctttcgtagagaaggtttgaaacactctctttgcagtatctggaagtggaaatttgaagcggtttcaggcctatgttgaaaaaggaaatatcttcccgtaacaactggacagaagcattctcagaagctagtctctgatgtgtgtcctcaactaacagagttgaacatttcttttgacagaaaagttttgaaacactctttttgaggagtctgcaagaggatatttgtctagatttgaggatatcgttggaaacgggtttacgtgtaaaaagcagacagcagcattctcagaaacttctttgtgatgtttgcattcaagtcacagaattgaacattctctttcacagagcagctttgaaacactctttttgtagtgtctgtaactggacttttggagcgctttccggactaaggtgaaaaaggacatatcttcccataaaaactagacagaagcattgtcagaaacttattcgtgatgtgtgtcctcaactgacggagtagaacctttcttttgatagagcagttttgaaacactctttttgtagaatctccaagtggatatttggatagctttgaggatttcgttggaaacgggaatatcttcatataaaatctagacagaagcattctcagaaacttccttgtgatggttgcattcaagtcacggagttgaacattcgctttcgtagagcaggttgataacactctttttcaattccctggaagtggacatttggagagctttgaggcctatggtgaaaaaggaaatatcttcccataaaaactagacagaagcattctcagaaacttctttgtgatgtgtgtcctcaactgacagagttgaaaatgtcttttgagagagcagttttcaaacactctttctgtggaacctgcaagtggatatttggctggctttgacgatttcgttggaaacgggaatacatataaaaagcagacagcagcgttctgagaaactacttggtgatgtttgcattcaagtcacagaatggaacgttccctttcatagaacaggtttgaaacacgccttttgtcgtatctggaagtgtccatttggagcgcattcaggctagtgttggaaaaggaaatatcttcccataaaaaccagacagaagcattctcggcaacttgtttgtgatgtttgccctctactaacagggtcgtacctttcttttcctagagcagttttgaaacactctttttgtagaatctgcaggagcatatttgcatagctttgaggatttcgttcgaaacgggattgtcttcagataaaatccagacagaagcattctcagaaacttctttgggttgtttgcattgacgtcacagaggagaacatgccctttcgtagagaaggtttgaaacactctctttgcagtatctggaagtggacatttgaagcggtttcaggcctatgttgaaaaaggaaatatcttcccgtaacaactggacagaagcattctcagaagctagtctctgatgtgtgttctcaactaacagagttgaacatttctttggacagtacagttttgaaacactctttttgtggagactgcaagtggatacttggctagatttgaggatttcgttggaaacgggataaggtatcaaaagcagacagcagcattctcagcaacttctttgtgatgtttgcattcaagtcacagaattgaacattccctttcacagagcaggtctgaaacactctttttgtagtgtctgtaactggacttttggggcgctttccggactaaggtgaaaaaggacctatcttcccataaaaactacacagaagcattgtcagaaacttattcgtgatgtgtgtcctcaactgacggagtagaacctttcttttgatagaacagttttgaaacactctttttgtagaatctccaagtggatatttggatagctttgaggatttcgttggaaacgggaatatcttcatataaaatctagacagaagcattctcagaaacttccttgtgatgtttgcattcaagtcacggagttgaacattcgctttcatagagtaggttggaaacactctttttccatcccctggaagtggacatttggagcgctttgaggcctatggtgaaaaaggaaatatcttcccataaaaactagacagaagcattctcagaaacttatttgtgatgtgtgtcctcaactgacagagttgaacatgtcttttgagagagcagttttgaaacactctttctgtggaacctgcaagtggatatttggctggctttgacgatttcgttggaaacgggaatacatattaaaagcagtcagcagtgttctgagaaactacttggtgatgtttgcattcaagtcacagaaaggaacgttccctttcatagaacaggtttgaaacacgccttttgtcgtatctggaagtggccatttggagcgcattcaggctagtgttggaaaaggaaatatcttcccataaaaaccagacagaagcnnnnnnnnnnnnnnnnnnnnnnnnnnnnnnnnnnnnnnnnnnnnnnnnnnnnnnnnnnnnnnnnnnnnnnnnnnnnnnnnnnnnnnnnnnnnnnnnnnnnagcattttcaggaacttctttgtgatgtttgcattcaactcacagagttgaacattccctttcatacagcagttttgaaacactcttttggtagtatctggaaatggacatttggagcgctttgaggcctatggtgaaaaaggaaatatcctcacataaaaactagacagaagcattctcagaaacttctttgtgatgtgtgtagtcaactcacagagttgaacctttcttttgataaagcagttttgaaacactctttttgtaggatctgcaaatggttatttgagtagctttgaggctttctttcgaaatgggaatatcttcacataaaaactagacagaagcattctcagaaacttctttatgaagtttgcattcaactcacagagttgaagtttccgttccatacagcagttttgaaactctctttttctagaatctgtaagtggaaacttggagcgcttcgaggcctatggtgaaaaagggaatatcttcccataaaaagtagacagaagaattctcagtaactactttgtgatgtgtgtactcaactcacagagttgaacttttcttttgaaagagaagttttgaaacactctttttgtagaatctgcaaatgggtatttagcctgctttgaggccttcattggaaacgggaatatcttcacataaaactagacagaagcattctcagaaacttcgttgtgatgtgcgcattcaactcccagagttgaagctctcttttgatagagcagttctgaaacaatctttttgtggtatctggaagtggacgtttggagcgatttgaggcctatggtgaaaaaggcaatatcttcacctaaaaattagacagaagcattctcagaaactgctttgtgatatgtgtagtcaactcacagatttgaaacgtggttttgatgcagcagttttgaaacactctttttgttagaatcttcaagtggatgtttggatagctttgaggctttcattggaaacgggaatatctacacataagaactagacagaagcattctcagaaagttctttatgaagttcgcattcaactcacagagttgtaccttccttttcacacagcagttttgagacattctttttgtagaatctgcaagtggacatttggagtgatttgagacttagggtgaaaaagggatatcttcccataaaaagttgacagaagcattctcagaaacgactttctgatttgtgtactcaactcacagagttaaacctttcctttgatacagcagtttggaaacactcttcttgtagaatttgcaagcggatataaggacagcagtgaggaattcatcggaaacggaatatcttcacataaaagtagacagaagcattctcagaaagttctttgtaatgtgtgcattcaactcacagagttgaaactttcttttgatagagcagattggaagccctctttttgtagaatttgcaagtggatatctggacagctttgaggccttccctggaaacgagtgtatcttcacataaacactagacagaagcatcctcagaaacttgttggtgatgcttgcattcaactcacagaattgaacatttcttttcctagagcagttttgaaacactctttttgtagtatctggaattggacagttggagcactttgaggcctagggtgaaaaaggaaatatcttcacataaaaactagacagaagcattctctgaaacttcttggttatgtgtgtactcaactcacagagttgaacttatcttctcatagatcagatttgaaaccctctttttgtagagtctgcaagtgcatatatggatagctttgaggatttcattggaaacgggaatatcttcccataaaaactagaaagaagcattctcagaaacttctttgtgatgcttgcattcaactcactgagttgaacattccctttcatacagcagttttcaaacactctttttgtagtatctggaagtggacctttggagcggtttgaggcctagggtgaaaaaggaaatatcctcacctaaaaactagacagaagcattctcagaaacttctttgtgatgtgtgtagtcaactcacagagttgaacctttcttttgatacagcacttttgaaacactctttttgtagaatctgcaagtggttattttgatagctttgaggctttgattggaaacgggaatatcttcacagaaaaactagacagaagcattctcagaaagttgtttatgaagtttgcattcaactcacagagttgaagtttccgttccatacagcagttttgaaactctctttttctagaatctgtaagtggaaacttggagcgcttcgaggcctatggtggaaaagggaatatcttcccataaaaagtagacagaagaattctcagtaactactttgtgatgtgtgtactcaactcacagagttgaacttttcttttgaaagagaagttttgaaacactctttttgtagaatctgcaaatgggtatttagcctgctttgaggccttcattggaaacgggaatatcttcacataaaactagacagaagcattctcagaaacttcgttgtgatgtgtgcattcaactcccagagttgaagctctcttttgatagagcagttctgaaacaatctttttgtggtatctggaagtggacgtttggagcgattcgaggcctatggtgaaaaaggcaatatcttcacctaaaaattcgacagaagcattctcagaaactgctttgtgatatgagtagtcaactcacagatttgaaacttggttttgatgcagcagttttgaaacactctttttgttagaatcttcaagtggatatttggatagctttgaggctttcattggaaacgggaatatctacacataagaactagacagaagcattctcagaaagttctttatgaagttcgcattcaactcacagagttgtaccttccttttcacacagcagttttgagacattctttttgtagaatctgcaagtggacatttggagtgatttgagacttagggtgaaaaagggatatcttcccataaaaagttgacagaagcattctcagaaacgactttctgatttgtgtactcaactcacagagttaaacctttcctttgatacagcagtttggaaacactcttcttgtagaatttgcaagcggatataaggacagcagtgaggaattcatcggaaacggaatatcttcacataaaagtagacagaagcattctcagaaagttctttgtaatgtgtgcattcaactcacagagttgaaactttcttttgatagagcagactggaagccctctttttgtagaatttgcaagtggatatctggacagctttgaggccttccctggaaacgagtgtatcttcacataaacactagacagaagcatcctcagaaacttgttggtgatgcttgcattcaactcacagaattgaacatttcttttcctagagcagttttgaaacactctttttgtagtatctggaagtggacatttggagcactttgaggcctagggtgaaaaaggaaatatcttcacataaaaaccagacagaagcattctctgaaacttcttggttatgtgtgtactcaactcacagatttgaacttttcttctcatagatcagatttgaaaccctctttttgtagtgtctgcaagtgcatatttggatagctttgaggatttcattggaaacgggaatatcttcccataaaaaccagaaagaagcattctcagaaacttctttgtgatgcttgcattcaattcacagagttgaacattccctttcatacagcagttttgaaacactctttttgtagtatctggaagtggacctttggagcgctttgaggcctagggtgaaaaaggaaatatcctcacctaaaaactagacagaagcattctcagaaacttctttgtgatgtgtgtagtcaactcatagagttgaacctttgttttgatacagcacttttgaaacactctttttgtagaatctgcaagtggttattttgatagctttgaggctttgattggaaacgggaatatcttcacataaaaactagacagaagcattctcagaaacttctttatgaagtttgcattcaactcacagagttgaactttccgttccatacagcagttttgaaactctctttttctagaatctgtaagtggaaacttggagcgcttcgaggcctatggtgaaaaagggaatatcttcccctaaaaagtagacagaagaattctcagtaactatttgtgatgtgtgtactcaactcacggagttgaacttttcttttgaaagagaagttttgaaacaccctttttgtagaatctgcaaatgggtatgtagcctgctttgaggccttcattggaaacgggaatatcttcacataaaactagacagaagcattctcagaaacttcgttgtgatgtgtgcattcaactcccagagttgaacctctcttttgatagagcagttctgaaacaatctttttgtggtatccggaagtggacgttgggagcgatttgaggcctatggtgaaaaaggcaatatcttcacctaaaaactagacagaagcattctcagaaactgctttgtgatatgtgtagtcaactcacggagttgaaactttgttttgatgcagcagttttgagacactcttttgttagaaacttcaagtggatatttggatagctttgaggctttcattggaaacgggaatatctacacataagaactagacagaagcattctcagaaagttctttatgaagttcgcattcaactcacagagttgtaccttccttttcacacagcagtttggagacattctttttgtagattctgcaagtggacatttggagtgatttgagacatagggtgaaaaaggaatatcttctcataaaaagtagacagaagcattctcagaaacgacgttctgattggtgtactcaactcacagagttaaacctttcctttgatacagcagtttggaaacactcttcttgtagaatttacaagcggatataaggacagcagtgaggaattcatcggaaacggaatatcttcacataaaagtagacagaagcattctcagaaagtcctttgtaatgtgtgcattcaactcacagagttgaaactttcttttgatagagcagattggaagccctctttttgtagaatttgcaagtggatatctggacagctttgaggccttccctggaaactagtgtatcttcacataaacactagacagaagcatcctcagaaacttgttggtgatgcttgcattcaactcacagaattgaacatttcttttcctagagcagttttgaaacactctttttgtagtatctggaagtggacagttggagcactttgaggcctagggtgaaaaaggaaatatcttcacataaaaactagacagaagtattctcagaaactactttgtgatgtgtgtactcaactcatggagttgaaattttcttttgaaagagaagttttgaaacactcttttcttagaatctgcaagtggatatttagcctgctttgattccttcgttggaaacgggaatatcttcacataaaaactagacagaagcattctcaggaagttttttgtgatgtttgcattcaactcacagagttgaacattccctttcatacagcagttttgaaacactcttttggtagtatctggaaatggacatttggagcgctttgaggcctatggtgaaaaaggaaatatcctcacataaaaactagacagaagcattctcagaaacttctttgtgatgggtgtactcaactcacatagttgaacctttcttttgatacagcagttttgaaacactctttttgtagcatctgcaagtggatatttggatagctttgaggctttctttggaaacgggaatatcttcacataaaaactacacagaagcattctcagaaacttctttatgaagtttgcattcaactcacagagttgaactttccgttccatacagcagttttgaaactctctttttctagaatctgtaagtggaaacttggagcgcttcgaggcctatggtgaaaaagggaatatcttcccataaaaagtagacagaagaattctcagtaactactttgtgatgtgtgtactcaactcacagggttgaacttttcttttgaaagagaagttttgaaacactctttttgtagaatctgcaaatgggtatttagcctgctttgaggccttcattggaaacgggaatatcttcacataaaactagacagaagcattctcagaaacttcgttgtgatgtgtgcattcaactcccagagttgaagctctcttttgatagagcagttctgaaacaatctttttgtggtatctggaagtggacgtttggagcgattcgaggcctatggtgaaaaaggcaatatcttcacctaaaaattcgacagaagcattctcagaaactgctttgtgatatgtgtagtcaactcacagatttgaaacgtggttttgatgcagcagttttgaaacactctttttgttagaatcttcaagtggatatttggatagctttgaggctttcattggaaacgggaatatctacacataagaactagacagaagcattctcagaaagttctttatgaagttcgcattcaactcacagagttgtaccttccttttcacacagcagttttgagacattctttttgtagaatctgcaagtggacatttggagtgatttgagacttagggtgaaaaagggatatcttcccataaaaagttgacagaagcattctcagaaacgacgttctgattggtgtactcaactcacagagttaaacctttcctttgatacagcagtttggaaacactcttcttgtagaatttacaagcggatataaggacagcagtgaggaattcatcggaaacggaatatcttcacataaaagtagacagaagcattctcagaaacttctctgtgatgtgtgcattcaacacactgagttgaaactttcttttgatagagcagattggaaacactctttttgtagaatttgcaagtggatatctggacagctttgaggcctttcttggaaacgagtgtatcttcacagaaacaaacactggagagaagcatcctcagaaacttgttggtgatgcttgcattcaactcacagaattgaacatttcttttcctagagcagttttgaaacactctttttgtagtatctggaagtggacatttggagcactttgaggcctagggtgaaaaaggaaatatcttcacataaaaactagacagaagcattctctgaaacttctttgtgatgtgtgtagtcaactcacagagctgaacctttcttttgatacagcagtttgtaacactcgttttgtagaatctgcaggtggttatttggatagctttgaggctttcattgggaacgggaatatcttcacataaaaactagacagaagcattctcagaaacttcttttatgaagtttgcattcaactcacagagttgaagtttccgttccatagagcagttttgaaactctctttttctagaatctgtaagtggaaacttggagcgcttcgaggcctatggtgaaaaagggaatatcttcccataaaaagtagacagaagaattctcagtaactactttgtgatgtgtgtactcaactcacagagttgaacttttcttttgaaagagaagttttgaaacactctttttgtagaatctccaaatgggtatttagcctgctttgaggccttcattggaaacgggaatatcttcacataaaactagacagaagcattctcagaaacttcgttgtgatgtgtgcattcaactcccagagttggagctctcttttgatagagcagttctgaaacaatctttttgtggtatctggaagtggacgttaggagcgattcgaggcctatggtgaaaaaggcaatatcttcacctaaaaattcgacagaagcattctcagaaactgctttgtgatatgagtagtcaactcacagatttgaaacttggttttgatgcagcagttttgaaacactctttttgttagaatcttcaagtggatatttggatagctttgaggctttcattggaaacgggaatatctacacataagaactagacagaagcattctcagaaagttctttatgaagttcgcattcaactcacagagttgtaccttccttttcacacagcagttttgagacattctttttgtagaatctgcaagtggacatttggagtgatttgagacttagggtgaaaaagggatatcttcccataaaaagttgacagaagcattctcagaaacgactttctgatttgtgtactcaactcacagagttaaacctttcctttgatacagcagtttggaaacactcttcttgtagaatttacaagcggatataaggacagcagtgaggaattcatcggaaacggaatatcttcacataaaagtagacagaagcattctcagaaagttctttgtaatgtgtgcattcaactcacagagttgaaactttcttttgatagagcagattggaagccctctttttgtagaatttgcaagtggatatctggacagctttgaggccttccctggaaacgagtgtatcttcacataaacactagacagaagcatcctcagaaacttgttggtgatgcttgcattcaactcacagaattgaacatttcttttcctagagcagttttgaaacactctttttgtagtatctggaagtggacagttggagcactttgaggcctagggtgaaaaaggaaatatcttcacataaaaactagacagaagcattctctgaaacttcttggttatgtgtgtactcaactcacagagttgaacttatcttctcatagatcagatttgaaaccctctttttgtagagtctgcaagtgcatatttggatagctttgaggatttcattggaaacgggaatatcttcccataaaaactagaaagaagcattctcagaaacttctttgtgatgcttgcattcaactcactgagttgaacattccctttcatacagcagttctcaaacactctttttgtagtatctggaagtggacctttggagcgctttgaggcctagggtgaaaaaggaaatatcctcacctaaaaactagacagaagcattctcagaaacttctttgtgatgtgtgtagtcaactcacagagttgaacctttcttttgatacagcacttttgaaacactctttttgtagaatctgcaagtggttatttggatagctttgaggctttgattggaaacgggaatatcttcacataaaaactagacagaagcattctcagaaacttctttatgaagtttgcattcaactcacagagttgaactttccgttccatacagcagttttgaaactctctttttctagaatctgtaagtggaaacttggagcgcttcgaggcctatggtggaaaagggaatatcttcccataaaaagtagacagaagaattctcagtaactactttgtgatgtgtgtactcaaatcacagagttgaacttttcttttgaaagagaagttttgaaacactctttttgtagaatctgcaaatgggtatttagcctgctttgaggccttcattggaaacgggaatatcttcacataaaactagacagaagcattctcagaaacttcgttgtgatgtgtgcattcaactcccagagttgaagctctcttttgatagagcagttctgaaagaatctttttgtggtatctggaagtggacgtttgcagcgattcgaggcctatggtgaaaaaggcaatatcttcacctaaaaattagacagaagcattctcagaaactgctttgtgatatgtgtagtcaactcacagatttgaaacgtggttttgatgcagcagttttgaaacactctttttgttagaatcttcaagtggatatttggatagctttgaggctttcattggaaacgggaatatctacacataagaactagacagaagcattctcagaaagttctttatgaagttcgcattcaactcacagagttgtaccttccttttcacacagcagttttgagacattctttttgtagaatctgcaagtggacatttggagtgatttgagacttagggtgaaaaagggatatcttcccataaaaagttgacagaagcattctcagaaacgactttctgatttgtgtactcaactcacagagttaaacctttcctttgatacagcagtttggaaacactcttcttgtagaatttacaagcggatataaggacagcagtgaggaattcatcggaaatggaatatcttcacataaaagtagacagaagcattctcagaaagttctttgtaatgtgtgcattcaactcacagagttgaaactttcttttgatagagcagattggaagccctctttttgtagaatttgcaagtggatatctggacagctttgaggccttccctggaaacgagtgtatcttcacataaacactagacagaagcatcctcagaaacttgttggtgatgcttgcattcaactcacagaattgaacatttcttttcctagagcagttttgaaacactctttttgtagtatctggaagtggacagttggagcactttgaggcctagggtgaaaaaggaaatatcttcacataaaaactagacagaagcattctctgaaacttcttggttatgtgtgtactcaactcacagagttgaacttatcttctcatagatcagatttgaaaccctctttttgtagagtctgcaagtgcatatttggatagctttgaggatttcattggaaacgggaatatcttcccataaaaactagaaagaagcattctcagaaacttctttgtgatgcttgcattcaactcactgagttgaacattcccattcatacagcagttctcaaacactctttttgtagtatctggaagtggacctttggagcgctttgaggcctagggtgaaaaaggaaatatcctcacctaaaaactagacagaagcattctcagaaacttctttgtgaagtgtgtagtcaactcacagagttgaacctttcttttgatacagcacttttgaaacactctttttgtagaatctgcaagtggttattttgatacctttgaggctttgattggaaacgggaatatcttcacataaaaactagacggaagcattctcagaaacttctttatgaagtttgcattcaactcacagagttgaactttccgttccatacagcagttttgaaactctctttttctagaatctataagtggaaacttggagcgcttcgaggcctatggtgaaaaagggaatatcttcccataaaaagtagacagaagaattctcagtaactatttgtgatgtgtgtactcaactcacggagttgaacttttcttttgaaagagaagttttgaaacaccctttttgtagaatctgcaaatgggtatgtagcctgctttgaggccttcattggaaacgggaatatcttcacataaaactagacagaagcattctcagaaacttcgttgtgatgtgtgcattcaactcccagagttgaacctctcttttgatagagcagttctgaaacaatctttttgtggtatccggaagtggacgttgggagcgatttgaggcctatggtgaaaaaggcaatatcttcacctaaaaactagacagaagcattctcagaaactgctttgtgatatgtgtagtcaactcacagatttgaaactgggttttgatgcagcagttttgaaacactctttttgttagaatcttcaagtggatatttggatagctttgaggctttcattggaaacgggaatatctacacataagaactagacagaagcattctcagaaagttctttatgaagttcgcattcaactcacagagttgtaccttccttttcacacagcagttttgagacattctttttgtagaatctgcaagtggacatttggagtgatttgagacttagggtgaaaaagggatatcttcccataaaaagttgacagaagcattctcagaaacgactttctgatttgtgtactcaactcacagagttaaacctttcctttgatacagcagtttggaaacactcttcttggagaatttacaagcggatataaggacagcagtgaggaattcatcggaaacggaatatcttcacataaaagtagacagaagcattctcagaaagtcctttgtaatgtgtgcattcaactcacagagttgaaactttcttttgatagagcagattggaagccctctttttgtagaatttgcaagtggatatctggacagctttgaggccttccctggaaactagtgtatcttcacataaacactagacagaagcatcctcagaaacttgttggtgatgcttgcattcaactcacagaattgaacatttcttttcctagagcagttttgaaacactctttttgtagtatctggaagtggacagttggagcactttgaggcctagggtgaaaaaggaaatatcttcacataaaaactagacagaagcattctctgaaacttcttggttatgtgtgtactcaactcacagagttgaacttatcttctcatagatcagaattgaaaccctctttttgtagagtctgcaagtgcatatttggatagctttgaggatttcattggaaacgggaatatcttcccataaaaactagaaagaagcattctcagaaacttctttgtgatgcttgcattcaactcactgagttgaacattccctttcatacagcagttctcaaacactctttttgtagtatctggaagtggacctttggagcgctttgaggcctagggtgaaaaaggaaatatcctcacctaaaaactagacagaagcattctcagaaacttctttgtgatgtgtgtagtcaactcacagagttgaacctttcttttgatacagcacttttgaaacactctttttgtagaatctgcaagtggttatttggatagctttgaggctttgattggaaacgggaatatcttcacataaaaactggacagaagcattctcagaaacttctttatgaagtttgcattcaactcacagagttgaactttccgttccatacagcagttttgaaactctctttttctagaatctgtaagtggaaacttggagcgcttcgaggcctgtggtggaaaagggaatatcttcccataaaaagtagacagaagaattctcagtaactactttgtgatgtgtgtactcaactcacagagttgaacttttcttttgaaagagaagttttgaaacactctttttgtagaatctgcaaatgggtatttagcctgctttgaggccttcattggaaacgggaatatcttcacataaaactagacagaagcattctcagaaacttcgttgtgatgtgtgcattcaactcccagagttgaagctctcttttgatagagcagttctgaaacaatctttttgtggtatctggaagtggacgtttggagcgattcgaggcctatggtgaaaaaggcaatatcttcacctaaaaattagacagaagcattctcagaaactgctttgtgatatgtgtagtcaactcacagatttgaaacgtggttttgatgcagcagttttgaaacactctttttgttagaatcttcaagtggatatttggatagctttgaggctttcattggaaacgggaatatctacacataagaactagacagaagcattctcagaaagttctttatgaagttcgcattcaactcacagagttgtaccttccttttcacacagcagttttgagacattctttttgtagaatctgcaagtggacatttggagtgatttgagacatagggtgaaaaagggatatcttcccataaaaatagacggaagcattctcagaaacgacgtactgatttgtgtactcaactcacagagttaaacctttcctttgatacagcagtttggaaacactcttcttgtagaatttacaagcggatataaggacagcagtgaggaattcatcggaaacggaatatcttcacataaaagtagacagaagcattctcagaaagttctttgtaatgtgtgcattcaactcacagagttgaaactttcttttgatggagcagattggaagccctctttttgtagaatttgcaagtggatatctggacagctttgaggccttccctggaaacgagtgtatcttcacataaacactagacagaagcatcctcagaaacttgttggtgatgcttgcattcaactcacagaattgaacatttcttttcctagagcagttttgaaacactctttttgtagtatctggaagtggacagttggagcactttgaggcctagggtgaaaaaggaaatatcttcacataaaaactagacagaagcattctctgaaacttctttgtgatgtgtgtactcaactcacagagttgaacttatcttctcatagatgagatttgaaaccctctttttgtagagtctgcaagtgcatatttggatagctttgaggatttcattggaaacgggaatatcttcccataaaaactagaaagaagcattctcagaaacttctttgtgatgcttgcattcaactcactgagttgaacattccctttcatacagcagttttcaaacactctttttgtagtatctggaagtggacctttggagcgctttgaggcctagggtgaaaaaggaaatatcctcacctaaaaactagacagaagcattctcagaaacttctttgtgatgtgtgtagtcaactcacggagttgaacctttcttttgatacagcacttttgaaacactctttttgtagaatctgcaagtggttatttggatagctttgaggctttgattggaaacgggaatatcttcacaaaaaaactagacagaagcattctcagaaacttctttatgaagtttgcattcaactcacagagttgaagtttccattccatacagcagttttgaaactctctttttctagaatctgtaagtggaaacttggagcgcttcgaggcctatggtgaaaaagggaatatcttcccataaaaagtagacagaagaatgctcagtaactactttgtgatgtgtgtactcaactcacagagttgaacttttcttttgaaagagaagttttgaaacactctttttgtagaatctgcaaatgggtatttagcctgctttgaggccttcattggaaacgggaatatcttcacataaaactagacagaagcattctcagaaacttcgttgtgatgtgtgcattcaactcccagagttgaagctctcttttgatagagcagttctgaaacaatctttttgtggtatctggaagtggacgtttggagcgattcgaggcctatggtgaaaaaggcaatatcttcacctaaaaattagacagaagcattctcagaaactgctttgtgatatgtgtagtcaactcacagatttgaaacttggttttgatgcagcagttttgaaacactctttttgttagaatcttcaagtggatatttggatagctttgaggctttcattggaaacgggaatatctacacataagaactagacagaagcattctcagaaagttctttatgaagttcgcattcaactcacagagttgtaccttccttttcacacagcagttttgagacattctttttgtagaatctgcaagtggacatttggagtgatttgagacttagggtgaaaaagggatatcttcccataaaaagttgacagaagcatcttcagaaacgacttcctgatttgtgtactcaactcacagagttaaacctttcctttgatacagcattttggaaacactcttcttgtagaatttacaagcggatataaggacagcagtgaggatttcatcggaaacggagtatcttcacataaaagtagacagaagcattctcagaaagttctttgtaatgtgtgcattcaactcacagagttgaaactttcttttgatagagcagattggaagccctctttttgtagaatttgcaagtggatatctggacagctttgaggccttccctggaaacgagtgtatcttcacataaacactagacagaagcatcctcagaaacttgttggtgatgcttgcattcaactcacagaattgaacatttcttttcctagagcagttttgaaacactctttttgtagtatctggaagtggacagttggagcactttgaggcctagggtgaaaaaggaaatatcttcacataaaaactagacagaagcattctctgaaacttcttggttatgtgtgtactcaactcacagagttgaacttatcttctcatagatcagatttgaaaccctctttttgtagagtctgcaagtgcatatttggatagctttgaggatttcattggaaacgggaatatcttcccataaaaactagaaagaagcattctcataaacttctttgtgatgcttgcattcaactcactgagttgaacattccctttcatacagcagttttcaaacactctttttgtagtatctggaagtggacctttggagcgctttgaggcctagggtgaaaaaggaaatatcctcacctaaaaactagacagaagcattctcagaaacttctttgtgatgtgtgtagtcaactcacagagttgaacctttcttttgatacagcacttttgaaacactctttttgtagaatctgcaagtggttatttggatagctttgaggctttgattggaaacgggaatatcttcacagaaaaactagacagaagcattctcagaaacttccttatgaagtttgcattcaactcacagagttgaagtttccgttccatacagcagttttgaaactctctttttctagaatctgtaagtggaaacttggagcgcttcgaggcctgtggtggaaaaggaaatatcttcccataaaaagtagacagaagaattctcagtaactactttgtgatgtgtgtactcaactcacagagttgaacttttcttttgaaagagaagttttgaaacactctttttgtagaatctgcaaatgggtatttagcctgctttgaggccttcattggaaacgggaatatcttcacataaaactagacagaagctttctcagaaacttcgttgtgatgtgtgcattcaactcccagagttgaacctctcttttgatagagcagttctgaaacaatctttttgtggtatctggaagtggacgtttggagcgattcgaggcctatggtgaaaaaggcaatatcttcacctaaaaattagacagaagcattctcagaaactgctttgtgatatgtgtagtcaactcacagatttgaaactgggttttgatgcagcagttttgaaacactctttttgttagaatcttcaagtggatatttggatagctttgaggctttcattggaaacgggaatatctacacataagaactagacagaagcattctcagaaagttctttatgaagttcgcattcaactcacagagttgtaccttccttttcacacagcagttttgagacattctttttgtagaatctgcaagtggacatttggagtgatttgagacttagggtgaaaaagggatatcttcccataaaaagttgacagaagcattctcagaaacgactttctgatttgtgtactcaactcacagtagttaaacctttcctttgatacagcagtttggaaacactcttcttgtagaatttacaagcggatataaggacagcagtgaggaattcatcggaaatggaatatcttcacataaaagtagacagaagcattctcagaaagttctttgtaatgtgtgcattcaactcacagagttgaaactttcttttgatagagcagattggaagccctctttttgtagaatttgcaagtggatatctggacagctttgaggccttccctggaaacgagtgtatcttcacataaacactagacagaagcatcctcagaaacttgttggtgatgcttgcattcaactcacagaattgaacatttcttttcctagagcagttttgaaacactctttttgtagtatctggaagtggacagttggagcactttgaggcctagggtgaaaaaggaaatatcttcacataaaaactagacagaagcattctctgaaacttcttggttatgtgtgtactcaactcacagagttgaacttatcttctcatagatcagatttgaaaccctctttttgtagagtctgcaagtgcatatttggatacctttgaggatttcattggaaacgggaatatcttcccataaaaactagaaagaagcattctcagaaacttctttgtgatgcttgcattcaactcactgagttgaacattccctttcatacagcagttttcaaacacactttttgtagtatctggaagtggacctttggagcgctttgaggcctagggtgaaaaaggaaatatcctcacctaaaaactagacagaagcattctcagaaacttctttgtgatgtgtgtagtcaactcacagagttgaacctttcttttgatacagcacttttgaaacactctttttgtagaatctgcaagtggttattttggtagctttgaggctttgattggaaacgggaatatcttcacagaaaaactagacagaagcattctcagaaagttgtttatgaagtttgcattcaactcacagagttgaagtttccgttccatacagcagttttgaaactctctttttctagaatctgtaagtggaaacttggagcgcttcgaggcctatggtggaaaagggaatatcttcccacaaaaagtagacagaagaattctcagtaactactttgtgatgtgtgtactcaactcacagagttgaacttttcttttgaaagagaagttttgaaacactctttttgtagaatctgcaaatgggtatttagcctgctttgaggccttcattggaaacgggaatatcttcacataaaactagacagaagcattctcagaaacttcgttgtgatgtgtgcattcaactcccagagttgaagctctcttttgatagagcagttctgaaacaatctttttgtggtatctggaagtggacgtttggagcgattcgaggcctatggtgaaaaaggcaatatcttcacctagaaattagacagaagcattctcagaaactgctttgtgatatgtgtagtcaactcacagatttgaaacgtggttttgatgcagcagttttgaaacactctttttgttagaatcttcaagtggatatttggatagctttgaggctttcattggaaacgggaatatctacacataagaactagacagaagcattctcagaaagttctttatgaagttcgcattcaactcacagagttgtaccttccttttcacacagcagttttgagacattctttttgtagaatctgcaagtggacatttggagtgatttgagacttagggtgaaaaagggatatcttcccataaaaagttgacagaagcattctcagaaacgacgtactgatttgtgtactcaactcacagagttaaacctttcctttgatacagcagtttggaaacactcttcttgtagaatttacaagcggatataaggacagcagtgaggaattcatcggaaacggaatatcttcacataaaagtagacagaagcattctcagaaagttctttgtaatgtgtgcattcaactcacagagttgaaactttcttttgatagagcagattggaagccctctttttgtagaatttgcaagtggatatctggacagctttgaggccttccctggaaacgagtgtatcttcacataaacactagacagaagcatcctcagaaacttgttggtgatgcttgcattcaactcacagaattgaacatttcttttcctagagcagttttgaaacactctttttgtagtatctggaagtggacagttggagcactttgaggcctagggtgaaaaaggaaatatcttcacataaaaactagacagaagcattctctgaaacttcttggttatgtgtgtactcaactcacagagttgaacttatcttctcatagatcagatttgaaaccctctttttgtagagtctgcaagtgcatatctggatagctttgaggatttcattggaaacgggaatatcttcccataaaaactagaaagaagcattctcagaaacttctttgtgatgcttgcattcaactcactgagttgaacattccctttcatacagcagttctcaaacactatttttgtagtatctggaagtggacctttggagcgctttgaggcctagggtgaaaaaggaaatatcctcacctaaaaactagacagaagcattctcagaaacttctttgtgatgtgtgtagtcaactcacagagttgaacctttcttttgaaacagttgttttgaatcactctttttgtagaatctgcaagtggttatttggatagctttgaggctttctttggaaatgggaatatcttcacataaaaactagacagaagcattctcagaaacttctttatgaagtttgcattcaactcacagagttgaacattccctttcatagaacagttttgaaacactctttttgtagaatctgtaagtggaaacttggagtgctttaaggcctatggtggaaaaggaaatatcttcccataaaaagtagacagaagaattctcagtaactactttgtgatgtgtgtactcaactcacagagttgaacttttcttttgaaagagaagttttgaaacactctttttgtagaatctgcaaatgggtatttagcctgctttgaggccttcattggaaacgggaatatcttcacataaaactagacagaagcattctcagaaacttcgttgtgatgtgtgcattcaactcccagagttgaagctctcttttgatagagcagttctgaaacaatctttttgtggtatctggaagtggacgtttgcagcgattcgaggcctatggtgaaaaaggcaatatcttcacctaaaaattagacagaagcattctcagaaactgctttgtgatatgtgtagtcaactcacagatttgaaacgtggttttgatgcagcagttttgaaacactctttttgttagaatcttcaagtggatatttggatagctttgaggctttcattggaaacgggaatatctacacataagaactagacagaagcattctcagaaagttctttatgaagttcgcattcaactcacagagttgtaccttccttttcacacagcagttttgagacattctttttgtagaatctgcaagtggacatttggagtgatttgagacttagggtgaaaaagggatatcttcccataaaaagttgacagaagcattctcagaaacgactttctgatatgtgtactcaactcacagagttaaacctttcctttgatacagcagtttggaaacactcttcttggagaatttacaagcggatataaggacagcagtgaggaattcatcggaaacggaatatcttcacataaaagtagacagaagcattctcagaaagtcctttgtaatgtgtgcattcaactcacagagttgaaactttcttttgatagagcagattggaagccctctttttgtagaatttgcaagtggatatctggacagctttgaggccttccctggaaacgagtgtatcttcacataaacactagacagaagcatcctcagaaacttgttggtgatgcttgcattcaactcacagaattgaacatttcttttcctagagcagttttgaaacactctttttgtagtatctggaagtggacagttggagcactttgaggcctagggtgaaaaaggaaatatcttcacataaaaactagacagaagcattctctgaaacttcttggttatgtgtgtactcaactcacagagttgaacttatcttctcatagatcagatttgaaaccctctttttgtagagtctgcaagtgcatatttggatagctttgaggatttcattggaaacgggaatatcttcccataaaaactagaaagaagcattctcagaaatttctttgtgatgcttgcattcaactcacagagttgaacattccctttcatacagcagtttggaaacactctttttgtagtgtctggaagtggacatttggagcgctttgaggcctagggtgaaaaaggaaatatcctcacctaaaaactagagagaagcattctcagaaacatctttgtggtgtgtgtagtcaactcagagagttgaacctttcttttgatacagcagttttgaaacactctttttgtagaatctgcaagtggttattttgatagctttgaggctttcactggaaacgggaatgtcttcacataaaaactagacagaagcattctcagaaacttctttatgaagtttgcattcaactcacagagttgaactttccgttccatacagcagttttgaaactctctttttctagaatctgtaagtggaaacttggagcgcttcgaggcctatggtgaaaaagggaatatcttcccctaaaaagtagacagaagaattctcagtaactactttgtgatgtgtgtactcaactcacagggttgaacttttcttttgaaagagaagttttgaaacactctttttgtagaatctgcaaatgggtatttagcctgctttgaggccttcattggaaacgggaatatcttcacataaaactagacagaagcattctcagaaacttcgttgtgatgtgtgcattcaactcccagagttgaagctctcttttgatagagcagttctgaaacaatctttttgtggtatctggaagtggacgtttggagcgattcgaggcctatggtgaaaaggacaatatcttcacctaaaaatttgacagaagcattctcagaaactgctttgtgatatgtgtagtcaactcacagatttgaaacttggttttgatgcagcagttttgaaacactctttttgttagaatcttcaagtggatatttggatagctttgaggctttcattggaaacgggaatatctacacataagaactagacagaagcattctcagaaagttctttatgaagttcgcattcaactcacagagttgtaccttccttttcacacagcagttttgagacattctttttgtagaatctgcaagtggacatttggagtgatttgagacttagggtgaaaaagggatatcttcccataaaaagttgacagaagcattctcagaaacgacgttctgatttgtgtactcaactcacagagttaaatctttcctttgatacagcagtttggaaacactcttcttgtagaatttacaagcggatataaggacagcagtgaggaattcatcggaaacggaatatcttcacataaaagtagacagaagcattctcagaaagttctttgtaatgtgtgcattcaactcacagagttgaaactttcttttgatagagcagattggaagccctctttttgtagaattaacaagtggatatctggacagctttgaggccttccctggaaacgagtgtatcttcacgtaaacactagacagaagcatcctcagaaacttgttggtgatgcttgcattcaactcacagaattgaacatttcttttcctagagcagttttgaaacactctttttgtagtatctggaagtggacagttggagcactttgaggcctagggtgaaaaaggaaatatcttcacataaaaactagacagaagcattctctgaaacttcttggttatgtgtgttctcaactcacagagttgaacttatcttctcatagatcagatttgaaaccctctttttgtagagtctgcaagtgcatatttggatagctttgaggatttcattggaaacgggaatatcttcccataaaaactagaaagaagcattctcagaaacttctttgtgatgcttgcattcaactcactgagttgaacattccctttcatacagcagttttcaaacactctttttgtagtatctggaagtggacctttggagcgctttgaggcctagggtgaaaaaggaaatatcctcacctaaaaactagacagaagcattctcagaaacttctttgtgatgtgtgtagtcaactcacagagttgaacatttcttttgatacagcacttttgaaacactctttttgtagaatctgcaagtggttatttggatagctttgaggctttgattggaaacgggaatatcttcacagaaaaacaagacagaagcattctcagaaacttccttatgaagtttgcattcaactcacagagttgaagtttccgttccatacagcagttttgaaactctctttttctagaatctgtaagtggaaacttggagcgcttcgaggcctgtggtggaaaagggaatatcttcccataaaaagtagacagaagaattctcagtaactactttgtgatgtgtgtactcaactcacagagttgaacttttcttttgaaagagaagttttgaaacactctttttgtagaatctgcaaatgggtatttagcctgctttgaggccttcattggaaacgggaatatcttcacataaaactagacagaaacattctcagaaacttcgttgtgatgtgtgcattcaactcaccgagttgaacctttcttttgatagagcagttctgaaacactctttttgtagtatctggaagtggacattaggagtgcttcgaggcctatggtgaaaaaggaaatatcttcacataaaaactagacagaagcattctcagaaactgctttgtgatatgtgtagtcaactcacagatttgaaacgtggttttgatgcagcagttttgaaacactctttttgttagaatcttcaagtggatatttggatagctttgaggctttcattggaaacgggaatatctacacataagaactagacagaagcattctcagaaagttctttatgaagttcgcattcaactcacagagttgtaccttccttttcacacagcagttttgagacattctttttgtagaatctgcaagtggacatttggagtgatttgagacttagggtgaaaaagggatatcttcccataaaaagttgacagaagcattctcagaaacgactttctgatttgtgtactcaactcacagagttaaacctttcctttgatacagcagtttggaaacactcttcttgtagaatttgcaagcggatataaggacagcagtgaggaattcatcggaaacggaatatcttcacataaaagtagacagaagcattctcagaaagttctgtgtaatgtgtgcattcaactcacagagttgaaactttcttttgatagagcagattggaatccctctttttgtagaatttgcaagtggatatctagacagctttgaggccttccctggaaacgagtgtatcttcacataaacactagacagaagcatcctcagaaacttgttggtgatgcttgcattcaactcacagaattgaacatttcttttcctagagcagttttgaaacactctttttgtagtatctggaagtggacatttggagcactttgaggcctagggtgaaaaaggaaatatcttcacataaaaactagacagaagcattctcagaaacttctttgtgatgtgtgtagtcaactcacagagttgaacatttcttttgatacagcacttttgaaacactctttttgtagaatctgcaagtggttatttggatagctttgaggctttgattggaaacgggaatatcttcacataaaaactagacagaaagcattctcagaaacttccttatgaagtttgcattcaactcacagagttgaagtttccgttccatacagcagttttgaaactctctttttctagaatctgtaagtggaaacttggagcgcttcgaggcctgtggtggaaaagggaatatcttcccataaaaagtagacagaagaatgctcagtaactactttgtgatgtgtgtactcaactcacagagttgaacttttcttttgaaagagaagttttgaaacactctttttgtagaatctccaaatgggtatttagcctgctttgaggccttcattggaaacgggaatatcttcacataaaactagacagaagcattctcagaaacttcgttgtgatgtgtgcattcaactcccagagttgaagctctcttttgatagagcagttctgaaacaatctttttgtggtatctggaagtggacgtttggagcgattcgaggcctatggtgaaaaaggcaatatcttcacctaaaaattagacagaagcattctcagaaactgctttgtgatatgtgtagtcaactcacagatttgaaacgtggttttgatgcagcagttttgaaacactctttttgttagaatcttcaagtggatatttggatagctttgaggctttcattggaaacgggaatatctacacataagaactagacagaagcattctcagaaagttctttatgaagttcgcattcaactcacagagttgtaccttccttttcacacagcagttttgagacattctttttgtagaatctgcaagtggacatttggagtgatttgagacttagggtgaaaaagggatatcttcccataaaaagttgacggaagcattctcagaaacgacgttctgatttgtgtactcaactcacagagttaaacctttcctttgatacagcagtttggaaacactcttcttgtagaatttacaagcggatataaggacagcagtgaggaattcatcggaaacggaatatcttcacataaaagtagacagaagcattctcagaaagttctttgtaatgtgtgcattcaactcacagagttgaaactttcttttgatggagcagattggaagccctctttttgtagaatttgcaagtggatatctggacagctttgaggccttccctggaaacgagtgtatcttcacataaacactagacagaagcatcctcagaaacttgttggtgatgcttgcattcacctcacagaattgaacatttcttttcctagagcagttttgaaatactctttttgtagtatctggaagtggacagttggagcactttgaggcctagggtgaaaaaggaaatatcttcacataaaaactagacagaagcattctctgaaacttcttggtaatgtgtgtactcaactcacagagtcgaacttatcttctcatagatcagatttgaaaccctctttttgtagagtctgcaagtgcatatttggatagctttgaggatttcattggaaacgggaatatcttcccataaaaactagaaagaagcattctcagaaacttctttgtgatgcttgcattcaactcactgagttgaacattccctttcatacagcagttttcaaacactctttttgtagtatctggaagtggacctttggagcgctttgaggcctagggtgaaaaaggaaatatcctcacctaaaaactagacagaagcattctcagaaacttctttgtgaagtgtgtagtcaactcacagagttgaacctttcttttgatacagcacttttgaaacactctttttgtagaatctgcaagtggttattttgatacctttgaggctttgattggaaacgggaatatcttcacataaaaactagacagaagcattctcagaaatttctttatgaagtttgcattcaactcacagagttgaagtttccgttccatacagcagttttgaaactctctttttctagaatctgtaaatggaaacttggagcgcttcgaggcctatggtggaaaagggaatatcttcccataaaaagtagacagaagaattctcagtaactacattgtgatgtgtgtactcaactcacagagtcgaacttttcttttgaaagagaagttttgaaacactctttttgtagaatctgcaaatgggtatttagcctgctttgaggccttcattggaaacgggaatatcttcacataaaactagacagaagcattctcagaaacttcgttgtgatgtgtgcattcaactcccagagttgaagctctcttttgatagagcagttctgaaacaatctttttgtggtatctggaagtggacgtttggagcgattcgaggcctatggtgaaaaaggcaatatcttcacctaaaaattagacagaagcattctcagaaactgctttgtgatatgtgtagtcaactcacggatttgaaacgtggttttgatgcagcagttttgaaacactctttttgttagaatcttcaagtggatatttggatagctttgaggctttcattggaaacgggaatatctacacataagaactagacagaagcattctcagaaagttctttatgaagttcgcattcaactcacagagttgtaccttccttttcacacagcagttttgagacattctttttgtagaatctgcaagtggacatttggagtgatttgagacttagggtgaaaaagggatatcttcccataaaaagttgacagaagcattctcagaaacgactttctgatttgtgtactcaactcacagagttaaacctttcctttgatacagcagtttggaaacactcttcttgtagaatttgcaagcggatataaggacagcagtgaggaattcatcggaaacggaatatcttcacataaaagtagacagaagcattctcagaaagttctttgtaatgtgtgcattcaactcacagagttgaaactttcttttgatggagcagattggaagccctctttttgtagaatttgcaagtggatatctggacagctttgaggccttccctggaaacgagtgtatcttcacataaacactagacagaagcatcctcagaaacttgttggtgatgcttgcattcaactcacagaattgaacatttcttttcctagagcagttttgaaacactctttttgtagtatctggaagtggacagttggagcactttgaggcctagggtgaaaaaggaaatatcttcacataaaaactagacagaagcattctctgaaacttcttggttatgtgtgtactcaactcacagagttgaacttatcttctcatagatcagatttgaaaccctctttttgtagagtctgcaagtgcatatttggatagctttgaggatttcattggaaacgggaatatcttcccataaaaactagaaagaagcattctcagaaacttctttgtgatgcttgcattcaactcactgagttgaacattccctttcatacagcagttttcaaacactctttttgtagtatctggaagtggacctttggagcgctttgaggcctagggtgaaaaaggaaatatcctcacctaaaagctagacagaagcattctcagaaacttctttgtgatgtctgtagtcaactcacagagttgaacctttcttttgatacagcacttttgaaacactctttttgtagaatctgcaagtggttattttgatagctttgaggctttgattggaaacgggaatatcttcacataaaaactagacagaagcattctcagaaagttgtttatgaagtttgcattcaactcacagagttgaagtttccgttccatacagcagttttgaaactctctttttctagaatctgtaagtggaaacttggagcgcttcgaggcctatggtggaaaagggaatatcttcccacaaaaagtagacagaagaattctcagtaactacattgtgatgtgtgtactcaactcacagagttgaacttttcttttgaaagagaagttttgaaacactctttttgtagaatctgcaaatgggtatttagcctgctttgaggccttcattggaaacgggaatatcttcacataaaactagacagaagcattctcagaaacttcgttgtgatgtgtgcattcaactcccagagttgaagctctcttttgatagagcagttctgaaacaatctttttgtggtatctggaagtggacgtttggagcgattcgaggcctatggtgaaaaaggcaatatcttcacctaaaaattagacagaagcattctcagaaactgctttgtgatatgtgtagtcaactcacggatttgaaacgtggttttgatgcagcagttttgaaacactctttttgttagaatcttcaagtggatatttggatagctttgaggctttcattggaaacgggaatatctacacataagaactagacagaagcattctcagaaagttctttatgaagttcgcattcaactcacagagttgtaccttccttttcacacagcagttttgagacattctttttgtagaatctgcaagtggacatttggagtgatttgagacatagggtgaaaaagggatatcttccaataaaaatagacggaagcattctcagaaacgacgtactgatttgtgtactcaactcacagagttaaacctttcctttgatacagcagtttggaaacactcttcttgtagaatttacaagcggatataaggacagcagtgaggaattcatcggaaacggaatatcttcacataaaagtagacagaagcattctcagaaagttctttgtaatgtgtgcattcaactcacagagttgaaactttcttttgatggagcagattggaagccctctttttgtagaatttgcaagtggatatctggacagctttgaggccttccctggaaacgagtgtatcttcacataaacactagacagaagcatcctcagaaacttgttggtgatgcttgcattcaactcacagaattgaacatttcttttcctagagcagttttgaaacactctttttgtagtatctggaagtggacagttggagcactttgaggcctagggtgaaaaaggaaatatcttcacataaaaactagacagaagcattctctgaaacttcttggttatgtgtgtactcaactcacagagttgaacttatcttctcatagatcagatttgaaaccctctttttgtagagtctgcaagtgcatatttggatagctttgaggatttcattggaaacgggaatatcttcccataaaaactagaaagaagcattctcagaaacttctttgtgatgcttgcattcagctcactgagttgaacattccctttcatacagcagttttcaaacactctttttgtagtatctggaagtggacctttggagcgctttgaggcctagggtgaaaaaggaaatatcctcacctaaaaactagacagaagcattctcagaaacttctttgtgatgtgtgtagtcaactcacagtagttgaacctttcttttgatacagcacttttgaaacactctttttgtagaatctgcaagtggttatttggatagctttgaggctttgattggaaacgggaatatcttcacagaaaaactagacagaagcattctcagaaacttctttatgaagtttgcattcaactcacagagttgaagtttccgttccatagagcagttttgaaactctctttttctagaatctgtaagtggaaacttggagcgcttcgaggcctatggtgaaaaagggaatatcttcccataaaaagtagacagaagaattctcagtaactactttgtgatgtgtgtactcaactcacagagttgaacttttcttttgaaagagaagttttgaaacactctttttgtagaatctccaaatgggtatttagcctgctttgaggccttcattggaaacgggaatatcttcacataaaactagacagaagcattctcagaaacttcgttgtgatgtgtgcattcaactcccagagttggagctctcttttgatagagcagttctgaaacaatctttttgtggtatctggaagtggacgttaggagcgattcgaggcctatggtgaaaaaggcaatatcttcacctaaaaattcgacagaagcattctcagaaactgctttgtgatatgtgtagtcaactcacagatttgaaacgtggttttgatgcagcagttttgaaacactctttttgttagaatcttcaagtggatatttggatagctttgaggctttcattggaaacgggaatatctacacataagaactagacagaagcattctcagaaagttctttatgaagttcgcattcaactcacagagttgtaccttccttttcacacagcagttttgagacattctttttgtagaatctgcaagtggacatttggagtgatttgagacatagggtgaaaaagggatatcttccaataaaaatagacggaagcattctcagaaacgacgtactgatttgtgtactcaactcacagagttaaacctttcctttgatacagcagtttggaaacactcttcttgtagaatttacaagcggatataaggacagcagtgaggaattcatcggaaacggaatatcttcacataaaagtagacagaagcattctcagaaagttctgtgtaatgtgtgcattcaactcacagagttgaaactttcttttgatagagcagataggaatccctctttttgtagaatttgcaagtggatatctagacagctttgaggccttccctggaaacgagtgtatcttcacataaacactagacagaagcatcctcagaaacttgttggtgatgcttgcattcaactcacagaattgaacatttcttttcctagagcagttttgaaacactctttttgtagtatctggaagtggacagttggagcactttgaggcctagggtgaaaaaggaaatatcttcacataaaaactagacagaagcattctctgaaacttcttggttatgtgtgtactcaactcacagagttgaacttatcttctcatagatcagatttgaaaccctctttttgtagagtctgcaagtgcatatttggatagctttgaggatttcattggaaacgggaatatcttcccataaaaactagaaagaagcattctcagaaactactttgtgatgtttgcattcaactcaccgagttgaacattccttttcatagaggagttttgaaactttccttttgtattatctgcaagtggacatattgagcgatttgactcctatggtgaaagaggaaatatcttcacatgaaaagtagagagaagcattctcagaaacttctttgtgatgtgtgtagtcaactcacagagttgaacctttcttttgatacagcacttttgaaacactctttttgtagaatctgcaagtggttatttggatagctttgaggctttgattggaaacgggaatatcttcacaaaaaaactagacagaagcattctcagaaacttctttatgaagtttgcattcaactcacagagttgaagtttccgttccatacagcagttttgaaactctctttttctagaatctgtaagtggaaacttggagcgcttcgaggcctatggtgaaaaagggaatatcttcccataaaaagtagacagaagaatgctcagtaactactttgtgatgtgtgtactcaactcacagagttgaacttttcttttgaaagagaagttttgaaacactctttttgtagaatctccaaatgggtatttagcctgctttgaggccttcattggaaacgggaatatcttcacataaaactagacagaagctttctcagaaacttcgttgtgatgtgtgcattcaactcccagagttgaacctctcttttgatagagcagttctgaaacaatctttttgtggtatctggaagtggacgtttggagcgattcgaggcctatggtgaaaaaggcaatatcttcacctaaaaattagacagaagcattctcagaaactgctttgtgatatgtgtagtcaactcacagatttgaaacgtggttttgatgcagcagttttgaaacactctttttgttagaatcttcaagtggatatttggatagctttgaggctttcattggaaacgggaatatctacacataagaactagacagaagcattctcagaaagttctttatgaagttcgcattcaactcacagagttgtaccttccttttcacacagcagttttgagacattctttttgtagaatctgcaagtggacatttggagtgatttgagacatagggtgaaaaagggatatcttcccataaaaatagacggaagcattctcagaaacgacgttctgatttgtgtactcaactcacagagttaaacctttcctttgatacagcagtttggaaacactcttcttgtagaatttacaagcggatataaggacagcagtgaggaattcatcggaaatggaatatcttcacataaaagtagacagaagcattctcagaaagttctttgtaatgtgtgcattcaactcacagagttgaaactttcttttgatggagcagattggaagccctctttttgtagaatttgcaagtggatatctggacagctttgaggccttccctggaaacgagtgtatcttcacataaacactagacagaagcatcctcagaaacttgttggtgatgcttgcattcaactcacagaattgaacatttcttttcctagagcagttttgaaacactctttttgtagtatctggaagtggacatttggagcactttgaggcctagggtgaaaaaggaaatatcttcacataaaaactagacagaagcattctctgaaacttcttggttatgtgtgtactcaactcacagagttgaacttatcttctcatagatcagatttgaaaccctctttttgtagagtctgcaagtgcatatttggatagctttgaggatttcattggaaacgggaatatcttcccataaaaactagaaagaagcattctcagaaactcctttgtgatgcttccattcaactcactgagttgaacattccctttcatacagcagttctcaaacactctttttgtagtatctggaagtggacctttggagcgctttgaggcctagggtgaaaaaggaaatatcctcacctaaaaactagacagaagcattctcagaaacttctttgtgatgtgtgtagtcaactcatagagttgaacctttcttttgatacagcacttttgaaacactctttttgtagaatctgcaagtggttattttggtagctttgaggctttgattggaaacgggaatatcttcacagaaaaactagacagaagcattctcagaaacttctttatgaagtttgcattcaactcacagagttgaagtttccgttccatacagcagttttgaaactctctttttctagaatctgtaagtggaaacttggagcgcttcgaggcctatggtgaaaaagggaatatcttcccataaaaagtagacagaagaattctcagtaactactttgtgatgtgtgtactcaaatcacagagttgaacttttcttttgaaagagaagttttgaaacactctttttgtagaatctgcaaatgggtatttagcctgctttgaggccttcattggaaacgggaatatcttcacataaaactagacagaagcattctcagaaacttcgttgtgatgtgtgcattcaactcccagagttgaagctctctttggatagagcagttctgaaacaatctttttgtggtatctggaagtggacgtttggagcgattcgaggcctatggtgaaaaaggcaatatcttcacctaaaaattagacagaagcattctcagaaactgctttgtgatatgtgtagtcaactcacagatttgaaacttggttttgatgcagcagttttgaaacactctttttgttagaatcttcaagtggatatttggatagctttgaggctttcattggaaacgggaatatctacacataagaactagacagaagcattctcagaaagttctttatgaagttcgcattcaactcacagagttgtaccttccttttcacacagcagttttgagacattctttttgtagaatctgcaagtggacatttggagtgatttgagacttagggtgaaaaagggatatcttcccataaaaagttgacagaagcatcttcagaaacgacttcctgatttgtgtactcaactcacagagttaaacctttcctttgatacagcattttggaaacactcttcttgtagaatttacaagcggatataaggacagcagtgaggatttcatcggaaacggagtatcttcacataaaagtagacagaagcattctcagaaagtcctttgtaatgtgtgcattcaactcacagagttgaaactttcttttgatagagcagattggaagccctctttttgtagaatttgcaagtggatatctggacagctttgaggccttccctggaaacgagtgtatcttcacataaacactagacagaagcatcctcagaaacttgtttgtgatgcttgaattcaactcacagagttgaacatttcttttcatagagcagttttgaaacactctttttgtagtatctggaattggacatttggagcactttgaggtctatggtgaaaaaggaaatatcttcacataaaaactagacagaagcattctctgaaacttctttgtgatgggtgtactcaactcactgggttgaacttttcttctcatagatcagatttgaaaccctctttttgtagagtctgcaagtgcatatttgaataggtttgaggatttcgttggaaatgggaatatcttcccataaaaactagacagaatcattctcagaaacttctttgtgatgcttgcattcaactcacagagttcaacattccttttcatagagcagttttgaaacactcttcttgaagtatctggaattggaaatttggagcactttgaggccaaaggtgaaaaaggaaatatcttcacctaaaaactagagagaagcttactcagaaacttctttgtgctgtctgtactcaactcatagagttgaacctttctttagatacagcatttttgtaacacactttttatagaatctgcaagtggatatatggatagctttgagggttcgttggaaacgggaatatcttcaagtaacaactagacagaagcattctcagaaacttctctatgaagtttgcattcaactcacagagttgaagtttccgttccatacagcagttttgaaactctctttttctagaatctgtaagtggaaacttggagcgcttcgaggcctatggtgaaaaagggaatatcttcccataaaaagtagacagaagaattctcagtaactactttgtgatgtgtgtactcaactcacagagttgaactttccttttgaaagagaagttttgaaacactctttttgtagaatctgcaaatgggtatttagcctgctttgaggccttcattggaaacgggaatatcttcacataaaactagacagaagcattctcagaaacttcgttgtgatgtgtgcattcaactcccagagttgaagctctcttttgatagagcagttctgaaacaatctttttgtggtatctggaagtggacgtttggagcgattcgaggcctatggtgaaaaaggcaatatcttcacctaaaaattagacagaagcattctcagaaactgctttgtgatatgtgtagtcaactcacagatttgaaacttggttttgatgcagcagttttgaaacactctttttgttagaatcttcaagtggatatttggatagctttgaggctttcattggaaacgggaatatctacacataagaactagagagaagcattctcagaaagttctttatgaagttcgcattcaactcacagaagttgtaccttccttttcacacagcagtttggagacattctttttgtagattctgcaagtggacatttggagtgatttgagacatagggtgaaaaaggaatatcttctcataaaaagtagacagaagccttctcagaaacgagtttctgatttgtgtactcaactcacagagttaaacctttcctatgatacagcagtttggaaacactcttcttgtagaatttacaagcggatataaggacagcagtgaggatttcatcggaaacggaatatcttcacataaaagtagacagaagcattctcagaaagttctgtgtaatgtgtgcattcaactcacagagttgaaactttcttttgatagagcagataggaatccctctttttgtagaatttgcaagtggatatctagacagctttgaggccttccctggaaacgagtgtatcttcacataaacactagacagaagcatcctcagaaacttgttggtgatgcttgcattcacctcacagaattgaacatttcttttcctagagcagttttgaaacactctttttgtagtatctggaagtggacagttggagcactttgaggcctagggtgaaaaaggaaatatcttcacataaaaactagacagaagcattctctgaaacttcttggttatgtgtgtactcaactcacagagttgaacttatcttctcatagatcagatttgaaaccctctttttgtagagtctgcaagtgcatatatggatagctttgaggatttcattggaaacgggaatatcttcccataaaaactagaaagaagcattctcaggaagtttttttgtgatgtttgcattcaactcacagagttgaacattccctttcataaagcagttttgaaacactcttttggtagtatctggaaatgggcatttggagcgctttgaggcctaaggtgaaaaaggaaatatcctcatataaaaactagacagaagcattctcagaaacttctttgtgatgtgtgtagtcaactcacggagttgaacctttcttttgatacagcagttttgaatcactctttttgtagaatctgcaagtggttatttggatagctttgagtctttctttggaaacgggaatatcttcatataaaaactagacagaagcattctcagaaacttctttatgaagtttgcattcaactcacagagttgaacatttcttttcatagagcagttttgaaacactatttttgaaggagcacttttacgcctatggtgaaaaaggaaatatctttgcataaaaactagacagaagaattctcagtaactactttgtgatgtgtgtactcaactcacagagttgaacttttcttttgaaagagaagttttgaaacactcttttcgtagaatctgcaagtggatgtttaacctgctttgaggccttccatggaaacgggaatatcttcacataaaaactagagagaaacattctcagaaacttcgttgtgatgtgtgcattcaactcaccgagttgaacctttcttttgatagagcagttctgaaacactctttttgtagtatctggaagtggacattaggagtgcttcgaggcctatggtgaaaaaggaaatatcttcacataaaaactagacagaagcattctcagaaactgctttgtgatatgtgtagtcaactcacagatttgaaacttggttttgatgcagcagttttgaaacactctttttgttagaatcttcaagtggatatttggatagctttgaggctttcattggaaacgggaatatctacacataagaactagacagaagcattctcagaaagttctttatgaagttcgcattcaactcacagagttgtaccttccttttcacacagcagttttgagacattctttttgtagattctgcaagtggacatttggagtgatttgagacatagggtgaaaaaggaatatcttctcataaaaagtagacagaagcattctcagaaacgagtttctgatttgtgtactcaactcacagagttaaacctttcctatgatacagcagtttggaaacactcttcttgtagaatttacaagcggatataaggacagcagtgaggatttcatcggaaacggaatatcttcacataaaagtagacagaagcattctcagaaagttctttgtaatgtgtgcattcaactcacagagttgaaactttcttttgatggagcagattggaagccctctttttgtagaatttgcaagtggatatctggacagctttgaggccttccctggaaacgagtgtatcttcacgtaaacaccagacagaagcatcctcagaaacttgttggtgatgcttgcattcaactcacagaattgaacatttcttttcctagagcagttttgaaacactctttttgtagtatctggaagtggacagttggagcactttgaggcctagggtgaaaaaggaaatatcttcacataaaaactagacagaagcattctctgaaacttctttgtgatgtgtgtactcaactcacagagttgaacttatcttctcatagatcagatttgaaaccctctttttgtagagtctgcaagtgcatatttggatagctttgaggatttcattggaatcgggaatatcttcccataaaaactagaaagaagcattctcagaaatttctttgtgatgcttgcattcaactcacagtgttgaacattccctttcatacagcagtttggaaacactctttttgtagtgtctggaagtggacatttggagtgctttgaggcctagggtgaaaaaggaaatatcctcacctaaaaactagagagaagcattctcagaaacatctttgtggtgtgtgtagtcaactcacagagttgaacctttcttttgatacagcagttttgaaacactctttttgtagaatctgcaagtggttattttgatagctttgaggctttcactggaaacggcaatgtcttcacataaaaactagacagaagcattctcagaaacttctttatgaagtttgcattcaactcacagagttgaactttccgttccatacagcagttttgaaactctctttttctagaatctgtaagtggaaacttggagcgcttcgaggcctatggtgaaaaagggaatatcttcccctaaaaagtagacagaagaattctcagtaactactttgtgatgtgtgtactcaactcacagagttgaacttttcttttgaaagagaagttttgaaacactctttttgtagaatctgcaaatgggtatttagcctgctttgaggccttcattggaaacgggaatatcttcacataaaactagacagaagcattctcagaaacttcgttgtgatgtgtgcattcaactcccagagttgaagctctcttttgatagagcagttctgaaacaatctttttgtggtatctggaagtggacgtttggagcgattcgaggcctatggtgaaaaggacaatatcttcacctaaaaattagacagaagcattctcagaaactgctttgtgatatgtgtagtcaactcacggatttgaaacgtggttttgatgcagcagttttgaaacactctttttgttagaatcttcaagtggatatttggatagctttgaggctttcattggaaacgggaatatctacacataagaactagacagaagcattcttagaaagttctttatgaagttcgcattcaactcacagagttgtaccttccttttcacacagcagttttgagacattctttttgtagaatctgcaagtggacatttggagtgatttgagacatagggtgaaaaagggatatcttcccataaaaagtagacggaagcattctcagaaactacttcgtgatgtgtgtactcaggtaacagagttaaacctttcctttgatacagcagttttgaaaaactcttcttgtagaatttacaagtggatattaggagagcattgaggatttcgttagaaacgggaatattttcacataaaactagacagaagcattctgagaaacttcctctggacgtttgcattcaactcacagagttgaacattccctttcatagagcagttttgaaacactctttttgtagaatctgtaaggggacgtttggagcgcttagaggcctatggtgaaaaaggaaatatcttcgcataaaaactagacagaagaattctcagaaacttctttttgatgtgtgtactcaactcacagagttgaacctttctattgatacagcagttttgaaacactctttttgtagaatctgcaagtggatatttggatagctttgaagctttcattggaaacgggaatatcttcacataaaaactagacagaagcattctcagaaacttctttgtgatgcttgcatttaactcactgagttgaacattccttttcatagagcagttttgaaacactctttttgtagaatccgcaagtggatgctagaaagcttttagacctatggtagaaaaggaaatatcttcacataaaaacaatacagaagcattctcagaaagtcctttgtaatgtgtgcattcaactcacagagttgaaactttcttttgatagagcagattggaagccctctttttgtagaatttgcaagtggatatctggacagctttgaggccttccctggaaactagtgtatcttcacataaacactagacagaagcatcctcagaaacttgtttgtgatgcttgaattcaactcacagagttgaacatttcttttcatagagcagttttgaaacactctttttgtagtatctggaattggacatttggagcgctttgaggtctatggtgaaaaaggaaatatcttcacataaaaactagacagaagcattctctgaaacttctttgtgatgggtgtactcaactcactgggttgaacttttcttctcatagatcagatttgaaaccctctttttgtagagtctgcaagtgcatatttgaataggtttgaggatttcgttggaaatgggaatatcttcccataaaaactagacagaagcattctcagaaacttctttgtgatgcttacattcaactcactgagttgaacattccctttcatacagcagttctcaaacactctttttgtagtatctggaagtggacctttggagcgctttgaggcctagggtgaaaaaggaaatatcctcacctaaaaactagacagaagcattctcagaaacttctttgtgatgtgtgtagtcaactcacagagttgaacctttcttttgatacagcacttttgaaacactctttttgtagaatctgcaagtggttatttggatagctttgaggctttgattggaaacgggaatatcttcacataaaaactagacagaagcattctcagaaacttctttatgaagtttgcattcaactcacagagttgaacattccctttcatagaacagttttgaaacactctttttgtagaatctgtaagtggaaacttggagtgctttaaggcctatggtggaaaaggaaatatcttcccataaaaagtagacagaagaattctcagtaactactttgtgatgtgtgtactcaactcacagagttgaacttttcttttgaaagagaagttttgaaacactctttttgtagaatctgcaaatgggtatttagcctgctttgaggccttcattggaaacgggaatatcttcacataaaactagacagaagcattctcagaaacttcgttgtgatgtgtgcattcaactcccagagttggagctctcttttgatagagcagttctgaaacaatctttttgtggtatctggaagtggacgtttggagcgatgcgaggcctatggtgaaaaaggcaatatcttcacctaaaaattcgacagaagcattctcagaaactgctttgtgatatgtgtagtcaactcacagatttgaaacttggttttgatgcagcagttttgaaacactctttttgttagaatcttcaagtggatatttggatagctttgaggctttcattggaaacgggaatatctacacataagaactagacagaagcattctcagaaagttctttatgaagttcgcattcaactcacagagttgtaccttccttttcacacagcagttttgagacattctttttgtagaatctgcaagtggacatttggagtgatttgagacttagggtgaaaaagggatatcttcccataaaaagttgacagaagcattctcagaaacgactttctgatttgtgtactcaactcacagagttaaacctttcctttgatacagcagtttggaaacactcttcttgtagaatttacaagcggatataaggactgcagtgaggaattcatcggaaacggaatatcttcacataaaagtagacagaagcattctcagaaagttctttgtaatgtgtgcattcaactcacagagttgaaactttcttttgatagagcaaattggaagccctctttttgtagaatttgcaagtggatatctggacagctttgaggccttccctggaaacgagtgtatcctcacataaacactagacagaagcatcctcagaaacttgttggtgatgcttgcattcaactcacagaattgaacatttcttttcctagagcagttttgaaacactctttttgtagtatctggaagtggacagttggagcactttgaggcctagggtgaaaaaggaaatatcttcacataaaaactagacagaagcattctctgaaacttctttgtgatgtgtgtactcaactcacagagttgaacttatcttctcatagatcagatttgaaaccctctttttgtagagtctgcaagtgcatatttggatagctttgaggatttcattggaatcgggaatatcttcccataaaaactagaaagaagcattctcagaaatttctttgtgatgcttgcattcaactcacagtgttgaacattccctttcatacagcagtttggaaacactctttttgtagtgtctggaagtggacatttggagtgctttgaggcctagggtgaaaaaggaaatatcctcacctaaaaactagagagaagcattctcagaaacttctttgtgatgtgtgtagtcaactcacagagttgaacatttcttttgatacagcacttttgaaacactctttttgtagaatctgcaagtggttatttggatagctttgaggctttgattggaaacgggaatatcttcacagaaaaactagacagaagcattctcagaaacttctttatgaagtttgcattcaactcacagagttgaagtttccgttccatacagcagttttgaaactctctttttctagaatctgtaagtggaaacttggagcgcttcgaggcctatggtggaaaagggaatatcttcccataaaaagtagacagaagaattctcagtaactactttgtgatgtgtgtactcaactcacagagttgaacttttcttttgaaagagaagttttgaaacactctttttgtagaatctgcaaatgggtatttagcctgctttgaggccttcattggaaacgggaatatcttcacataaaactagacagaagcattctcagaaacttcgttgtgatgtgtgcattcaactcccagagttgaagctctcttttgatagagcagttctgaatcaatctttttgtggtatctggaagtggacgtttggagcgatttgaggcctatggtgaaaaaggcaatatcttcacctaaaaattagacagaagcattctcagaaactgctttgtgatatgtgtagtcaactcacagatttgaaacgtggttttgatgcagcagttttgaaacactctttttgttagaatcttcaagtggatatttggatagctttgaggctttcattggaaacgggaatatctacacataagaactagacagaagcattctcagagagttctttatgaagttcgcattcaactcacagagttgtaccttccttttcacacagcagttttgagacattctttttgtagaatctgcaagtggacatttggagtgatttgagacttagggtgaaaaagggatatcttcccataaaaagttgacagaagcattctcagaaacgactttctgatatgtgtactcaactcacagagttaaacctttcctttgatacagcagtttggaaacactcttcttggagaatttacaagcggatataaggacagcagtgaggaattcatcggaaacggaatatcttcacataaaagtagacagaagcattctcagaaagtcctttgtaatgtgtgcattcaactcacagagttgaaactttcttttgatagagcagattggaagccctctttttgtagaatttgcaagtggatatctggacagctttgaggccttccctggaaacgagtgtatcttcacataaacactagacagaagcattctcagaaacttctttgggatgttgcattcaagtcacagagtagaacattcccattcatagagcagatttgaaacactctttttgtagtatctggaagtggacatttggagcactttcaggcctagggtgaaaaaggaaatatcttcacataaaaactagacagaagcattctctgaaacttcttggttatgtgtgtactcaactcacagagttgaacttatcttctcatagatcagatttgaaaccctctttttgtagagtctgcaagtgcatatatggatagctttgaggatttcattggaaacgggaatatcttcccataaaaactagaaagaagcattctcagaaacttctttgtgatgcttgcattcaactcactgagttgaacattccctttcatacagcagttttcaaacactctttttgtagtatctggaagtggacctttggagcgctttgaggcctagggtgaaaaaggaaatatcctcacctaaaaactagacagaagcattctcagaaacttctttgtgatgtgtgtagtcaactcatagagttgaacctttcttttgatacagcacttttgaaacactctttttgtagaatctgcaagtggttatttggatagctttgaggctttgattggaaacgggaatatcttcacataaaaactagacagaagcattctcagaaacttctctatgaagtttgcattcaactcacagagttgaactttccgttccatacagcagttttgaaactctctttttctagaatctgtaagtggaaacttggagcgcttcgaggcctatggtgaaaaagggaatatcttcccataaaaagtagacagaagaattctcagtaactactttgtgatgtgtgtactcaactcacagagttgaacttttcttttgaaacagaagttttgaaactcgctttttgtagaatctgcaaatgggtatttagcctgctgtgaggccttcattggaaacgggaatatcttcacataaaactagacagaagcattctcagaaacttcgttgtgatgtgtgcattcaactcccagagttgaagctctcttttgatagagcagttctgaaacaatctttttgtggtatctggaagtggacgtttggagcgattcgaggcctatggtgaaaaaggcaatatcttcacctaaaaattagacagaagcattctcagaaactgctttgtgatatgtgtagtcaactcacagatttgaaacgtggttttgatgcagcagttttgaaacactctttttgttagaatcttcaagtggatatttggatagctttgaggctttcattggaaacgggaatatctacacataagaactagacagaagcattctcagaaagttctttatgaagttcgcattcaactcacagagttgtaccttccttttcacacagcagttttgagacattctttttgtagaatctgcaagtggacatttggagtgatttgagacttagggtgaaaaagggatatcttcccataaaaagttgacagannnnnnnnnnnnnnnnnnnnnnnnnnnnnnnnnnnnnnnnnnnnnnnnnnnnnnnnnnnnnnnnnnnnnnnnnnnnnnnnnnnnnnnnnnnnnnnnnnnncctcacttttagaaattaatttggcttttaaggggcctggatagtaaagtattttattggcgtttgaatgaaccaagaaaatacatataaatacacatgcgtaactataagggcaaaggtagtactttcgaaatcacagcattagattaaacaatgtaaatttttaattgttttttaaaaaatcaagtctttctcatcttactagaaactatttaccagagtaaataagcttcttactgaagtcaaaagactttctggaaaaacttctccttgatgaaattacacttaaaacatcacttccatcgtgaagtatttaagatgttcctggtccttttcctgttatgtggaatcgtcaattcaaattttaaaagtgactttgagatgtttttcatctattattttaaaaatgttgaaggcgtttttaattctgccttcaacagagatggacacactctgattatgatgtaaaactgaacacgttactctgacaggctttcttttctgcaacacagctaccatcattattaaggattgaatgcttttactccatgcacaatctgtattccctgctttataaagaacagaaatctaattctcactatgaaggcagataaaagtaatcccttcaacctatagatgaatcattaaccaaagcactcagactttaaatagcatttatcaaatgtgtctacatttctacgcagattcatagaaagaacatgtagtttaaatcattgcacattttatgcttttaatgagttgtgatggtcattagtatttttatcacatttccccaaaggtaggctaattactgttattattttcagctagaaatataaaatgaattttctatttttgatgactttgaaacataatccttgcaatataatatctgtgtataatatctgtggaaagcatgaaagtaatattcaaacagtaggcattttttccagaatgaaaatttcctctacaataacattcaccttttttttcccgatgggcaaataaaagtcaacatttctaagattgctggacgttatttacattaaacttgcctcagcgtcaggtgttgcagaaactggacaaaaggccacaaggtacacaatacacacacacacacacacacacacacaaaacttgtattattatacttacctaagtgtctaaagaggtggataaatatattaggttgctccagaagaaggatttttacggggcctattggaaagtatgactgcagtttgagtgagatgtctgtaagagattcaatttggccactaatagagtatccaattttaaaaatactgacagaaggctcatgagatagaaattttcacctagatctattggaaatatactactagattctgtagaaaaagactggtgcggtaattgtaaaacacatctgatatctaaatctttgtctgttttttacctgaaatccttatgagggtgattgtgtatgtcaatttgaatcttcccgtcaacaagataaataaatacataaataaatagccaggctgcctggataaattagttcaccttttctatattttgagggcagtgcttctcctcctttgacagacacaagattcacccggggatcccttgcaatgaaaaaccatagaccacactttgactagcttggataaggggccagagcactgaaatgagtgtgtagctgactgtgctaagattctcctgctcatttgggcactggctcaccaaataaacaaagcttaggacctctagtccttgccggaaaagaaatacacatacataggatgtgactgtgcatgtggaatatctgttgtgttctggacattgtgctagacaacagagataagaagtcaaataatcccttgtctctatctgaaaagagcttcctaaacactggcttttgaggtctttgaaactagattcactttcagatttgattattatatttatgatttgatattttcattgaaccccatgatatgataaagttttctagaacctgctagaataattgactttgctctcagcattatgaagccactggggcacataagtaattcatttatgtttctatttaaccagacaggaacaacttgagctacttttctaaccactttcgtttagagctgtttttgtttgttatttttgtttgtttgtttttgagacgggtctcactctgtcacctaggctggaatgcagtggcatgatcagagctcactgcagcctctaccttctgggctcaagcaatcctctcacctcagactcctgaaaagctgggaccacaggctcataccatcatacccagctcattaaaaatatatattttttttgtagagacggtttttccatgtttcctagacttgtctccaactcttgaacttaagcaatctgcctgcctcagcctcctaaagtgtagagctgtgttttcagtcttttttgagctgttttacaatccaattttgaattggtaagtttggattcattctgacatttacagatttaacatcctacttcacaagatgctcatagccttaatccattacagccgatgcatcatccatctctgctcatagccttgatccattacagtagccacctcgtccatctctgctcatagcctaaagtaatagaagccagagggaagaaaaggaagccaacgtgagtccagaacacacattttataagagtataagaaatataaaaatagcaaagtgtatcgtgaagtttgtaatagatgtgcatggttaaaatttattcttaatcaatatattctataaattgggaaaaaatattaaacacatgaaaagtaaggaacttgggctgggtgtggtggctcatgcctgtaatcccagcactttgggaggccgaggcttgcggatcacaaggtcaggagatcaagaccatcctggctaacatggtgaaaccccgtctccactaaaaatacaaaaaaattagccaggtgtggtggtgggtccctgtagtcccagctactcggaaggctgaggcaggagaatggcatgaacccgggaggcgtagcttgcagtgagccgagatctggccacttcactccagcctggggacagagcgagactccgtcgcaaaaaaaaaaagaaagaaaagtaaggaactttcatcattaatatataacaattatgacaagaatgtggtttatgtttttatctttgcaagatttgggaacatttagtggaaggaggaagaatttataatcatgaagagtgtgtatgatactggagggagccttttgagaaggcggaaatggcatcacgagctatgctatggtcatagctatgtgggagcgcagccagctatggtctcccccgtcaaacccactgggcagtgttcagttaccaacattgagatagagctcacccacccaggacagaagagaaaatatacactgcagtcagaaaccactgtgtaggaagctcctttcagaaagaggcaagggatatttgactttttatctctagtgtctagtacaatgttgagaacacaacagatattccatatgcacagtcacatcctatgtatctgtatttcttttccagcaggaactggaggtcctaagtttcgttcatatggtgagccaatgcccacatgaacagtaggatcttagcactgtcacctggacatccatttaaatgctcttgtcttagctagtcaaagtgtggtctatgagtttgcattttaataagcttccagggtgaatcttaggcatgttacagggaagcactgtcctacatcatatgtgacaggctctcatagtcaccatcatcacgggaatcttgtgcatgttacagggaagcactgtcctacatcgtatcagacaggctctcatagtcacaatcatcacgggaatcctgtgcgtgttacagaggaagcactgtcctacatcatatgtgacaggctctcatagtcaccatcatcacgggaatcttgtatatgttacagggaagcaccgtcctacatcatatgtgacaggctctcatagtcaccatcatcacgggaatcttgtacatgttacagggaagcactgtccaacatcatatgtgacaggctttcacagtcaccatcatcagggcaatcttgtgcatgttacagggaaacactgtcctacatcatatgtgaaaggctctcatagcactatcatcatggaaatcttgtgcatgttacagggaagcactgtccaacatcatatgtgacaggctttcacagtcaccatcatcagggcaatcttgtgcatgttacagggaaacactgtcttacatcatatgtgaaaggctctcatagcactatcatcatggaaatcttgtgcatgttacagggaagcactgtcgaacatcatatgtgacaggctgtcatagtcaccattcccatgaccatagtcatgggaatcttgctcgtgttacagggaagcactgtccaacatcatatgtgacaggttctcatcgtcaccatcatcatgggaatcttgtgcatgttacagggaagcattgtcctacatcgtatctgacaggctctcgtagtcaccatcatcaggggaatcttgcacacgttacagggaagcactgtcctacatcatatgtgacaggctctcacagtcaccatcatcacaggaatcttgcacacgttacagggaagcactgtcctacatcatgtgacaggctttcatagtcaccatcaccatgggaagctgcatttagagcatttaactatatgggctctgaaatcagataacttaggtttagacttacttctacttcttactaagcagagaactctggggtgaaaagtttacgagacccagttttatcatgtccaaattggaggcatggggaaattatagcattttgcatagaatattgttttaagtataaaatgaaatagtacatagtaagcttctgccatacactgactgcacaataaatattagttaatagtaactcatttaatcctaaggtctataaatttgtacacaataattttttgtgactaccttaattttcataattagtctagatttaaaatcaaggaatgttcttacgtgtagttggcaatcaatatgacatgccaaaattatatgtaagtatttcattgttggtggggatataagaaatttaccatcaaaagagagacgataatctatgtttgcagactccagaaagctgtctctcacataagaatttgcaatttctgggggaaaagaaaaagttgattgtgcaaagagattaccatggagtcttctctatggcaacaccacaaatgaaagctgattctcatcttcctaacaatctgcaaagacgagtgaaacacaacctactgagcatcaagttaaagaaggagagaatttgagtggcacaggaggaaatcatgtcaccgctaggaaaatcaatatgaccagtgctcctctgccctcctccgaggctaaggaggggttaaatatcagtggctggcctcaggtaatggaatgagcaaaaaagctataaaaatgcgtgcattacataattaagagggtgggaagggattttttttaaaacgcaattcccactcgggttccttcctgttcaccccactggcgaagaagctagtcttgccctagaattctgggaatggctgcagacaaaacaaacactgagcagacgaaattcccagtaatttactcatcacacatattcagcccagtgggggatgacactgcatttatgcaggtctacccagtgttgcactctagaacagaaggtgtgggaggcaggcttggtagaaatcagagggtggggtaacccctcgtcccttcagggatgtgcttgactaattcagagttttgcagtctggtgggggcatgaaagccattaggctgaggacatggtggggtgctgcatgaaattttaggtgtcacaatacaattgacccctgatgctttaacatcagacatttattttcgtaatgactaatattttgagaggctgagcgaaagctgctgagacattgtaataagtgtttagggacatgagagattaggaaggccacagttatgagtaatgtaatgtggaagccgatgcaaagctactgcccccatttatttagcaggaggcaggaaaagtgatctggggtctctggcagaataagcgtgtttgtaaatatttgggtgatgtcatgcattcctcatgcattggtttagagatctggggtctctggcagcacaagagtgttcataattatttgggtgacgtcatgcatcccccatgcattggttttcatgtctccagtgagttgttgggcaagtctgatattactgatccacacgcagcaggcagcttcctgtactgagctagctccaccccttggacagtccaggactgaatggttgtcaaaaatgtgaactccttgatgtccagtaaaggcaactgagggaactgtgtagcattggtgtaaaaagtgcactttcctaagaagcatgaacttagagtaatcaaagcctgtgacaacagtgaaacccagcagggcatccagtcgctgctttgtaacttaaataggaattctttgaggagctcagtctatctctcaactaaagcagctgcctgcagcctataggggcagtggaagccctactagacactttcacaagcctagcactgtgttttctgatgaaatgttgccttggtcaccatcagtagtgtcaggaactctgcaggggataaggagtgtccctgtgagatctgtactgtgtccttcgttaaaaaaaaggcatctgttaccttgattgtattctgagtatccatgaggcaagaagtttctttaattcaatggggagggaaggtggataattcttggcaattgccaaaaatttgtaaaaatgtacaaatggggctaattgttggcccagcatcagtgctgagatgaccacctcaagtttggccagttgtgctgaggcttgggtgtcatcctttatcagggacatcctggctaagggagggaagaccgcaacaacatcccactgagctccatcacttcagatgatggcatccattcagaaggtggatgaacttcactgctggtcactcagtcgatcccaaggggcctcggagatgggtgacttccagcaacacagcctgaggatgaaggaggccagtgtttcctgcagatgagaatggcagggggtccaggtttgactccatcctgaggcaaggaggtctctgtagctgtgccaaggctgtggggtgctgcttcccaaggcctgatggccagatgggcatgaaggctcgtggacatggatgcagagccctctgtttccagagggtccagtatgtggtcagcaataactgccctgatgctgtacagaacacagtgaaaaggggcaggtttgttttttacatcagaagcccatggactacttatggccaccatatgcaatccagatacttcaggaggcatggtaagaggttgctaaagcatccacagtgtgttctctgagggaattcataggcgcacctgttaatttagatttggacagattccagacttgttggaggaggcttcattcaaggtggatcagttagccaatgacagaaagcatcagtgagattaagtaagatttgtaaataagaaatatgttgtcacctgaaccccaagtaaagaattaaagggctgggaacagtggctgacacctgtaatcccagaactttgggaggccgaggtaagaggatcgcttcagcccaggagtttgagaccagtctgggtaacatagcgagacgttttctctacaaaaaaataaacaaaattagctgagtgtggtggcacacacctgcagtcctagctacttggaaggccgagatgggagaattgctagagctcaggaggtcgaggctgcagtgagctgaaatcgtgccacttcataccagcctgggtgacagagcaagactgtgcctccaaaaaacaaaacacaaattaaagaatgttgggcttgtattaacattgtggacgctgagaggatcaataactatttcttgaaagtgtcaggaatagagtagctccatgtttaccaaggaattttcaggaattgaagcaaagtggcagggccttgcacatctgtgttgtggaaaggtccattccctttgtgtaagcctccttgtatctgtgtgtccttagtgcgtaaaatgaattttctctgagaatgatgtcatcactataatgtcacacctgtgctcctgtagaaacctggttgcagtgagatcttgtctgtgaagattgcatgcaataacaaggctgccgaggcactccgtgggtcgcctggtcccttcagagatgaaggcaggctatgactgagactctgttaaaataggcacaaaaagaacatggtagccaaatctgtaacaacaaaatatttatcagttgcatgaatatatataggtttattgtaaggaattggctcatgtggttatgaaggccaagaagtcccaggacctgcagtcagcaagctggagacccaggactgccaatgttggagttccagtccaagcctaaagtcctgagaaccaggaaagctgatggcataagttacagtccacgtctgacttcaaaggcgagagaagatctatgtctcagctctgaaatcatcagagagtgaattctctcttcctctacccttgtgttttatttgggttttaatggattggatgaggcccactcacactggggagggcaactactttactaagtctacatattcaaatgttcgtctcatcaaggaacaccctcacagacacatccagagtgtttaaccaaatatctaggcaacccaacttggcaaataaaattaaccatcataaggcgaaagatgtatacgatctgaagacaaatcagggatgcaggatggttaaatatctgcaagtcaataaatgtgatacaccatataaatagaattaaaaacaaaaatcacatgatcatctcaatacatgcagaaaaaggatttgacaaaatccagcatccctttatgcctaaaaccctcagcaaaactgacatagaaaaagcattttacaaaatccagaatccctttgtgattaaaaccctcagcaaaatcaacatcgaagggacataccttaaggtaataaaagccatatatgacaaacacagacaacattatatggaatggggaaaagttgaaagcattccccctgagaactggaacaagacaatgatgccaactttcaccacttctattcaacacagtactagaagtcctcgccagaacgatcagataagaaataaagggcatccaaatcggtaaagaggaaatcgaactgtcactctttgctgatgacatgatcgtatacctaaaaaaccctaaagactcatcccaaaagctactagaactggtaaatgaattcagcaaagtttcaggatacaaaattaatgtacacaagtcagtggctctgctatacagtaatagtgaacaagctgagaattatataaaaaactcacccccttttacaatagctgcaataaaaaccttaggaatattataattcctataattataatagtatattcctataattgtcaattgcatgcaatctttgcagacaaaatcttaattatatccggaatgcttaaccaaaaagacaaaagacgtctacaaggaaaactataaaacactgctgatagaaatcatagatacaaaaaaatggaaacacatcccatgcttacggatgggtaacatcaatattgtgaaaataccatactgccaaaagcaatctacaaactcaatgcaatccccattaaagtaccaacatcagtcttcacagaactacaaaaattcacatggaactaaaaaagatatagaagggacataccttaaggtagtaaaagcctagaaccaaaaaagagtctgtatagccaaagcaagactaagcaaaaagaacaaatctagaagccgacttcaaactatactagaaggccatagtcaccaaaacagcatggtactggtataaaaatagccatatagatcaatggaacataatagagaacccagaaataaagccaaatacttacagtcatctaatcttcaacaaaacaaacaaaaacataaagcagagaaagaataccctattcaacaaatggtgctgagataaatggcaagccacacatagaagaatgaaagtggatgctcatttctcaccctattcaaaaatcaactcaagatggatcaaggacttaaatctaatatctgaaaccataaaaattctagaagacaacattggaaaaacccttctagacattggcttaggcaaagacttcatgaccaataacccaaaaagcaaaagcgactaaaacaaagataaatagatgagacttaattaaactcaaaggcttctgcgcagtaagagaaataatccgcagagtaaacagataacctacagagtgggagaaaatcttcgtaatctgtacttctgattaaaggactaatacccagaatctgcaaggaactcaaacaaaccagcaagaaaaacatcccatcaaaaagtgggctaaggacatgaacagacaattctcaaaagaagataagcaactggccaacaaacacatgaaaaaatgttcaacataactaattatctgggaaatgcaaatcaaaaccacaatacaatatgataccccttcactcctgcaagaatggtcataatcaaaaaatcaaaaattaatagatgttggcatggatgtggtaaaaagggaacacttttacactttttggagggaatgtaagctagtacaacagctatggaaaacagtgaggaaatttccaaagaactaaaagcagatctatcatttgatccagtaattccactcctgggtatctactcagaggaaaataaaccattatatgaaaaagatacttgcacacgcatgtttatagcagcacaatatgcaattggaagaatttgaaaccagcctaaatgcccatcaatcagtaagtggataaataaaatgtggtataaatatttaccacatggaatactactcagccataagatggaatgaaataatgcattcatagcaacctggatgaaactggacaccattattctaaatgaagcaacttaggaatggaaaaccaaacattgtgtattctcattcataagtgagagctaagctatgaggatgtaaaggcataagaatgatacaatggtcttcggggactcagggaaaggctggcagtggtggggtgggtgcagtgagggatgaaacactacgcattgggtacagtgtacactgcttggatgataggtgcaccacaaatctcagaaattgccactaaagaacttattcctgtaaccaaacaccacctgtttcccaaaaacctattgaaataaaaaaaaaattaaccacaatattaggcatttgggtacgagggccttaatggatgggagcactgcagtcacattacagcaatccactgtgaaacaccatttattatttgcaggtttaagaaaaggccaaattctactgctaaacgttgaagcaatgagaattatcaccccttcactaattaattaggtcttatataataagttttatttatttgaagtcatgttgtaatttatgttggaccatatttgctaatttatcaagatggggaggctgggcacgatggcccacacctgtaatcccagcactttggtaggccgaggcaggaggattgcttgaggccagaagttagagaccagcctaagcaacatagcaagactccacttctataattttttttaattggctgtgttggtgcatgcctgtaatcccagctacttggaaggctaaaatgggaggattgcttgagcccaggagttcaaggcagcagtgagctatgattgtgccaccacacttcattcagccggggtagtggagcaaaacctcatctctaaaaaaatgaaaaattaaaaataaatcaaatttaaaaaaaaaacaggagagggagttctgtaaggttacatttggtgaagtcaatgtgtaagtgcaaatgatttaatatcaatttgttactcattagttcagagcatccaggtcccctatggacaaaggcttctacgactactggaaatttagtcaaggtaaaaaatgtgaggcataactatgtgtcctctattctatatgcagttactctgctaggattaggggatgcaatgtttaaatttagtgaaatctcaggtataacaaagtttgagctccagtattgattaagtttgtgaaggtatgccaattggtagatttcagcagatgttaaaattgattcagaatatatgctggagagttacaaataccaatcagcacacttttatctttggactgtataaattgttttagaaaatagtacatgtccaattaggtcagatgatagacttccgttttaatttaaattttgtttttgtgcatatccaagttccttcccttccttccttccttctttccatatttccttccttccttccctctttccttccttccttcctgccttccttctccttccctctttccttcctttcttccttccttccttccttccctctctccttccttccttccctccctccttccttccttccctctcttccttctttccttccttcctgccctcctttcctctctccttccttccttcattccttccttccctctctccttccttccttccttccatccctccctccctccctacttccttccttccttccctctctccttccttccctccttacttccttccttccctttccctcatttttttgccgctggatatggggaaggttgttctctttcccactcatatttataatttctttctttgaaacagacccaaatcagtgtcttcagagttaaggtcctccttgtgagcagattgtgtcattttagaaccctagacttaagtcaggtttggatttctcccttctctctgcctcaggggtaccacaggtgtcttttcctataaccctgggaattagatctttgttgcggcagaaccataagtcacagagcgatgcagcacaaccagcccacaattcaggggtcagtggattgaaatcatcttctgctacggctccatctggttcttccaggacttctctcacccccttttttcccttttagggtgttgaaactttagtggtatatacattgcctcataatcagtcaaaactccatttatcccacatcatggattaaagaaaacattgccaggagcccttcactcttctagaaggacttaatttgatagtccctttttccatggtttagaatataagaggtaataactaaaaatatctccctcataataggctctaaagcaaattctactttaaaggctgttgttcgtgtgtttaactgtggctacccttaatgtttttatcatccacagacaattgttgtctcattttggtcctctttaaatgatggttttataatcagctataaaatttaacagatgcccttaaatgcaggattctgattaatgacgctggagattgtgatattagaagagggaaaactttcaaataggagagtgaatggtgtttggtctactttggactgtatttttataaatatattattagtatgtgttccaaaattattgaaaacttctatagaaatgtaatccccagtgtcggagatggggcctgctgggaggtggctggtccatgggagcagtttccagtggttcccagtgtcggagaaggggcctgctggaaggtggctggtccatgggagcagcctccagtggttcccactgtcggagatggggcctgctgggaggtggctggtccatgggagcagtttctaatggataagcataatccctctagcactgctcttgtgatagagttctcaagagatcttgttgtttaaagtgtgtaggatcttccccctctctctcttcctcctgctcttgctttcccttccaccatgattgttaagtttcctgagtcctccccagaagccgagcagatgtcagcatcatgcttgctgtacaggctgtggaactgtgagccaattttcagtactcttctgttttctttttatttttttttaaattttattttaagttccaggatacatgtgcaggagatgcaggtttgttacgtaggtaaacgtgcactatgatgatttgctatacctatcaacccactgcctaggtgcgtaggtattaagccccacatgcgttagctatttatcctgatgctctccctccccgtccccactgacaggccccagtgtgtgttcttcccctccctgtgtccaggtgttctcattattcagctcccacttatgaatgagaacatgtggtgtttggtcttctgttcctgtattagtttgctgaagatgatggtttccagattcattcatgaccctgcaaaaggcatgatctcattcctttttatggttgcacagtattgcatggcgtgtatgtaccacattttctttatccagtctatcactgatgggcatttggattgattccatgtttttcctaatgggaatagtgccgatataaacatacccgtgcatgcatctttataatagaatgatttatagtcctttggatatatacccagtaatgggatttctgggtcaaatggtatttctggttctagatccttgcagaattgccaaactgtcttccacaatgattgaactaattaacatttctaccaacagtgtaaaagtgtttatttctccacagccttgccagcatctattgtttcttgactttttatttttttattatagtttaagttttagggtacatgtgcaaaacgtgcaggtttgttacatatgtatacatgtgccatgctggtgtcctgcacccattaactcgtcatttagcattaggtgtatctcctaatgctatccctcccccctccccccaccccacaacagtccccagagtgatgttccccttcctttgtccatgtgttctcattgttcaattcccacctatgaatgacaaaatgcggtgtttggttttttgtccttgtgatggtttgctgagaatgatggtttccagcttcatccatgtccctacaaaggacaggaactcatcattttttatggctgcatagtattccatggtgtatatgtaccacattttcttaatccagtctatcattgttggacatttgtgttggttccaagtctttgctattgtgaatagtgccacaataaacatacgtgtgcatgtgtctttatagcagcatgatttatagtcctttgggtatatacccagtaatgggatggctgggtcaaatggtatttctagttctagatccctgaagaatcaccacactgacttccacaatgggtgaactagtttacagtcctaccaacagtgtaaaagtgttcctatttctccacatcctctccagcacctgttgtttcctgactttttaatgaccaccattttaaccggtgtgagatgatatctcattgtggttttgatttgcatttctctgatggccagtgatggtgagcattttttcatgtgttttttggctgcataaatgtcttcttttgagaagtgcctgttcatatcctttgcccactttttgattttgttttgttttgttttgttttttggtcaatttgtttgagttcattgtagattctggatattaaccctttgtcagatgagtaggttgcaaaaattttctcccattctgcaggttgcctgttcactctgatggtagtttcttttgctgtgcagaagctctttagtttaattagatcccatttgtcaattttggcttttgttaccattgcctttggtgttttagacatgaagtccttgcccatggctatgtcttgaattgtattgcctaggttttcttctagggtttttatggttttaggtctaacatgtaagtctttaatccatcttgaattaatttttgtataaggtggaaggaagggatccaggttcagctttctacatatggctagccagttttcccaggaccatttattaaatagggaatcctttccccattgcttgtttttgtcatgtttgtcaaagttcagatggttgtagataagtggcattatttctgagggctctgttctgttccactgatctacgtctctgttttggtaccagtaccatgctgttttggttactgtagccttgtagtatagtttgaagtcaggcagtgtgatgcctccggctttgttcttttggcttaggattgacttggcgatgcgggatcttttttggttccacatgaactttaaactagttttttccaattctgtgaagaaagtcattggtatctttatggggatggcattgaatctataaattaccttgggcagtatggccattttcatgatactgattcttcctacccatgaacaaggaatgttcttccatttgtttgtatcctcttttatttcattaagcaatggtttgtagttctccttgaagaggtccttcacatcccttgtgagttggattcctaggtattttattctctttgaagcaattgtgaatgggagttccctcatgatttggctctctgtctgttattggtgtataagaatgcttgtgatttttgtacattgattttgtatcctgagactttgctgaagttgcttatcagcttaaggatattttgggctgagataatggggctttctagatatacaatcatgtcatctgcaaacaggtacaatttgacttcctcttttcctaattgaataccttttattcccttctccttcctgattgccctggccagaacttccaacactatgttgaataggagtggtgagagagggaatccctgtcttgtgccagttttcgaagggaatgcttccagtttttgtctattcagtatgatactggctgtgggtttgtcatagatagctcttattattatgtgatatgtcctatcaatacctaatttattgagagtttttagcatgaatgttgttgaattttgtcaaaggccttttctgcatctattgagataatcatgtggtttttgtctttggttctgtttatatgctggattacatttattgatttgcatctgttgaaccagccttgcatctcagggatgaagcccacttgatcatggttgataagctttttgatgtgctgttggatttggtttgccagtattttattgaggattttggcatcaatgttcatcaaggatattggtctaaaattctcttttttggttgtgtctctgccaggctttgttatcaggatgatgctggcctcataaaatgagttagggaggattccctctttttctattgaatggaatagtttcagaaggaatggtaccagttcctccttgtacctctggtagaattcggctgtgaatccatctggtcctggactttttttggatggtaagctattgattattgccacaatttcagagcctgttattggtctattcagagattcaacttgtttctggtttagtcttgagagggtgtatgtgtcgaggaatttatccctttcttctagattttctagtttatttgcctagaggtgtttgtagtattctctgatggtagtttgtatttctgtgggatcggtggtgatatcccctttatcattttttattgcacctatctgattcttctctcttttcttctttattagtcttgctagcggtctatcgattttgttgatcttttcaaaaaaccagctcctggattcactaattttttgaagggttttttgtgtctctatttccttcagttcttctctgatattagttatttcttgccttctgctagcttttgaatgtgtttgctcttgcttttctagttcttttaattgtgatgttaggttgtcaattttggatctttcttgctttctcttgtgggcatttagtgctataaatttccctctacacactgatttgaatgtgtccgagagattgttatgttgtgtatttatttttttaaggcagagtcttgctctgtcgcccaggctggagtacagttgctcgatctcagttcactgcaccctccacctcccaggttcaagcgattctcctgcctcagcctcctgattagctgggattacaggcgcctgccaccacacccagataatttttgtatttttagtagagatgaggtttcaccatgttggccaggcttgtctcaaactcctgacctcatgtgatccacccgcctcagcctcccaaagtgctgggattacaggtgtgagccaccgtgccctgcctgtttcttgtatttgatgatgaaaatctgttattgacagtaagaggatgggggctcaagttaacaacagggtgttagaaaagcagcagtaaaattttggttctcaaaacatttgatgtcttattcctttttttgaacatgggttttgctaaaaaaaaggccaggcattttgaaacttgattttattgtcatgttctcattttgaaattcatcttattgtttgtacgaattggcagccgtatgtgggaaatttcagttttgcatattttctgattattttcatttttacctcagagattttgaacagatgctatacaaaagtattcatgtatttattcaacaaaatttagtgctggttatgttgcaagcacttagtgaacttcatgctgtacgtgcctcagatacttttgtgaatgtaatggcaacatcaaaaactttgcccttatgcactttataaacttttaatttcaaggcatgttgatgagtgagcatctgctataacatactttcattgtcatttaattaaccattatttgggtacaccttatattaaaactgattattaaaaactggaaaatatttaacacatcttcatcttgactttttccttaacatatgtagatcaagggagtcactgagaatcaattttagggatagttataaaaatcttaactttgcaatataactttgtcctcaatgtaataactggaaaaaataatttacgtttcaaaggctttaatctttgtatttttttgaaaaggagccttcaccgagattctttaaaaattcttgctctgtcctacagtagagactgatagactcatggatatggtcctctaatggatctgtactacctcagttctctgactgtcgccctcctgtggtgaaaattaaagcttattttcatttcatgtttaggatgtagtatgttcttttttggaaaaaatgatgtttcttgagaaataagtgccttcagtattactgtgtgtcacttaataaatatgactaatatctacttttaccaattgttgcaatttgatccttaaagagtcatctttaaattatactttttctttggttaaataaattataatagacattaattatttttacataattttcttatgtggacagccattcttagaactaaaactttcagatgtttatattacaagtacaattattatttattattattaatgtcagtagccaaatgtaatcaactgtcttccttttacttccttttttgaatcaaaatgttacacttatacaagcaagagcaacagctctatatctggatcactgcagtgcctagaagatacaacagcacaatttacaaatccaaatttccaggaagtctctgcacatacctctagtacaaaagatgcttcagagactagagggtcagagggcagagaggaaatattcaactcccagttcaggtcaaaagggaagaaagcctggtgttgaaagaaatccaagaatgactgtatctgcaactcgctcctttctgtaaagtattcatggtgttttacttaaaatatgtgctcttatgatggtcaatattaatagttatgctttgtaaaagaatttattctttacttataattaatggatcattctaagttattatatgtttagttgctatagtaagattatgtgaaagatttgtttcctgttaaatgtttctgggatctttgctttatttttatattatgatctgtgctttcaaagttgagctgtaattttattgtttatacaaatgtagaataaagcttaagtatggggagaaaaataaaagctagagttttcctttcagctatagaacagtaatttatttctataaatgttctttatgtagctttcctagttccacatttaaaaagataaatatggggatctacacaggtctcagtaaataatagttcttgatgaataatgcatttattataaagcttcaagtttaaagtagaattttgctcagcctacatatcttttatggtcaggctgctctaattatgtaatacccagttaaatttcaatttcagataaataaggcataatattttagtataagcatgtcccaaatattgtatgggatatacttacactgaaaaaagtatttgtttatctgaaatttcaaattaactgggcatgctatattttctgtggcaacctgttttatagagaacagagtaagtcagctcaattttagaatacttaaccataacctggtgttctaggtctttcctttttgtaattattattattatttggagtcagggtcgtgctccatcacccaggctggggtgcagtggcacaatcacagtgccctgcagccttgaacttctgggctcaagtgattctggcacctctgcctttccctcccaagtagctagtatcacaggtacatgggcccagctaattttttttttttttttctcatagagacagggtctccggctggtctggaactcctggtctcaagcaatcctcccacctctgcctttacttcccaaatagctgagaccacaggcacatgccaccaccatacccagcttattttttagcaggttggtgcaagagtaattgcgggttttgcccttgaaagtaatggcaaaacctgcaattactttttgcaccaccctaataattctttgtggagacagggtcttgtcctgttgtctaggctggtttccagctcctgggctcgagtgaccctcctgccttggcctctaaaacttctgggattacagatggaagccactgcaccaagctactttgtataatttttaacataaacataaatattttgagaaatagaaatgttaaaaccattggaggaaaatatattgtaaagtatacaatagaaaaaaaatcaaacaaaatacaacaaaaaattatcaaaatattcagaggaacaaaacaaaatctagttttacaatcttcagaattcaatcccattatatcaaacatataaagaaatatattcaaagaaaaaggcaatcaatagagactaacctcgagatgacccagatgttggaattagtgtggatttttaaagtagttagttattgtaattcttactaaaatcaaaaccccaaaaacccgtaaaataaatggatggaaatcacagcagagaagaagaaactacaataataacaaaggctcaagtggaaattctagaagtgagaacgttttcaaaattaaaaaataataatcagttgtgttcaggagcagcttggaggtggaaaagagtcaatgaaccttaaaatacaattgaaatgattcaatctgaaaaatgtgagcagtcataggttggggtgagggagattttcctttggttaatgcttttaggtaatcttggttttgataagattactagactgatccatcaggggcatgctaagccagagtttatcttggtttcagtagtgctttaaacaaaactcatgatatccttgtgtacaagatggaagaagagtggaccagatgacaatatttagatgcagtcattcttaacctccgttgctctcccagttgtctagctgggatttgtataaagtggaatgggaggaatagggaaggagcccacacctgccctctccccttgtccacttgtcctgcttcactagtggataaagtccacgggaacaggcaagttattttaaatctgtatcttctgttgtcaagatctgtaatcagttctgctcgctggactggggacaggaaccaagggaacatgagggtgaacgggttgacatggagtccaagaacacactgtgcctacatgcagaatgtttgtgccaggaaagccagtcagcaggcagatggtctcaggtaccaagctagtgttgtgaagcaagattcagtctcttgaaggtggtgttcctcattctgtggtttgtatcacttgctcagaatgacctggagtacttgttaaaatgcaaattttgagcccaatcctagacctcctaagcctgcatctctacggatgggtctcagtagtcgatattggaaacgtgcaggttcctaggagatgcttatgcatatagatttgaactgttgtgtttaagggttagggagctggcaaaagcaaggaatagaccaagcccttgggtgggaaggctccataaccttgacactgttagcattctgggcagaacaggattctgccgcatgctttgcagcatccctagcctctactctctaacaccgtattccagttgtgaaaaccaaaaatgtcccctcggaggcaaaatagtcaccagttgggaaccggaaccactgctttgtgggatcagagtggttactttgttcccaatccaaggatcagaacacacgacgagagaaagtccagctattggaactggagtgccaagttgaagctaggcctacaaaaaaagctccaaaagctcctttatagggctgatcccatgcctcagctacctagcttgtacagatgccatgtaactctagatttggtgacagaaggaatttaaggctagaactagataggttctttcaggttaggccagcacacaacgtggacttttgacatcatccagatgcttgaaccaacctcagtcctgaggcagaatttcccgtggcatctgatacacagcctggatttggagcactcactgggattagatgccacgggaatattgtgtttaggtactctgaaagagacaggcttcaacaaagcagacctaagcaacacgtagcgtctgaacttctttatcagcttccattccagcccacgaggacaaaagcatcacatacatacccactgtggcaaacctgtcctcagtagggagtttccccagtactactctcccctctgttctgagcctacttgctcctttatagtgtttccactttctgtcccactccctaatagatgatttgtcctctctgtccagccccctagttctgatatttggattgtctgtgatctgggcagtacttaggaggtagaatcaaagccttgttgattggattgggagtttctaacttcctatgaaaggcactgattaagcatctattgtttaaagtaaagtaagattatgatccattaagaaagattccacaagtagcgcaggaagagttggtttctagtacacttcatgcttcaggacaggaaatacagaaaaaaattctgtggtacgttaaatgtgtactgtaagtttcatttccatgtgaaaaactgtagttagctaaaaagtacatccatgaagaatcctgattaaacttgtttaatcctggttatactagctactagctaaacaataatttcacaacaactcaagaactctgtaaaagcatttcctctgaatattttattcagaaaaaaaacacaaaaaggtaagacagaaacaaaaatcccagtcatctgcagtatctgtcggctttcaatttggttctcttttttaaataaagaaaaatagtaaaattaatctatgtaaaacatgccatatatattcaactgctactaaatataaaaagctttaaaactgtgtgttcaattttggttattgtattaccacaacacttatattaaaacatgtatacttttaaattgggtttccataaaaaatggattctaatcttataaaagttatttcctaatattcaataaatgttgcctaagggcttttcaatccaaatagcaattttaattattctggaatttaagggtgctctaaatttccatttaacagggtgagaatgctgtattattacaagtgaaaaaagttacaggacacagagcttattccgttttagagtccatatcctgattatattttatatcctcttcttgatttcttacaactagacacatattcatttgctcagctggaaaaaattcttaacattatttactgactttaggtatgaactctaccagctagttaacaggaaatacataattaaacattgcctttatcaagtaatgtaaaaaaagggtaagagtaactttgcaacataggacttgaatgagcagctggtgattatcaacatctggcacttaactgatttatgcttgtacactcacagctaaacgtctctacctgtttttctatgttgtaaatctaggccatcacttatctacataggaagaataataaatattaataatgtgctatgataaacatcctgcactcttccaaatcttacaataaaactgcttcaatttcacttatttagcttttatacttagttttttagttgatatatgcttattttaaggaacctgaactactctaacagaatccacataatttttgtattagtcaaactgcttctttctaactctggttctaatagttataaaaagataatgataaatttatgaagtagatacagtcaaacctgaatttcttaaagtatatacttagaatcggttataatttttagatattctttcttgacagtcttttcccaaactcatgatgtcctctctaggtaatattgccacactcataaattataaataaagacaaaaatgtgaaaactacagtaatttaagagaatatagcttttctacatgccatttctattggctactgaaaaatagtgaaaataagtaaatagctacctgtccagaagcgtttcatgcaaaaatccatctttctgagcctttttaagaattttactctcttctttacttattttaagtttgtggtcttggaagctctgaaatttctttctgcaaagaaaatgtcttcattgaaaaatacctcaaactctgattatacatatttactattaaatttataaatactgttaatttctttttcacttattaaaaaagtctaattgtagggcaggcgcagtggctcacgcctgcaatcccagcactttgggaggccaaggcaggcagatcacttgaggtcaggagttcgagaacagcctggccaacatggtgaaaccccgtctctactaaaaatacaaaaattggccgagggcagtggcttgtgcctgtagtcccagctactcgggaggctgaggcaggagaatcacatgaacctgggaggcggaggttgcgatgagctgagatcatggcacagcactacaatctgggggacagagcgagactccgtcttgggggagaaaaaaaaaaagtctaattgtacattttttttaataagctggagcttttgaacaacaagatgaactttgtgacctctcaagaggagggccactcattgactgggtagcacaaagccccacttctattagggcatgctggctggagtcccctgtgtcctagccagagaacagcctttgactggcatcacgcccattctatgaatgaatagagaggttgactaacccgactgagtacctttgggagctggtaggatgattaggaaaactgaaccctcaagaaaagaaaagaatttagctcagtgctctgtcctagaggctacatcgtgttgcttcttcttgtccatcagtttttattttttcagacgggatcttgctctgtcacccaggctggaatgcagtggtgatcagagctcactgcagccttgaactcctgggctcaaacaatcctcctgtctcagcctcccaagtagctgggcctacaggcatgcaccaccatccccagctaattaggtaatttattttgaaagcactttgagaagcacttcactgtcaaatctgtaggtctaaaaggaaaagcatacacacacgtaattgatttcacattgttttatatttcctttgtcttcttctggaatgtcatcttttttcttggtttctctttcagcacaggatctaatctagatattggaaaagagaatccaatgggttatatgtttatcttccaccttccccactttacgtatcacataagaatatttgagatgatttcttatgcagaagaaaaaattaactgagcaactatattcagaaaaagacaggttctggctatgtgtttttaattcatatatataatctatatgagtaagtgctatcatatgcttcctccgcagcccttgtgtcagaaacactacagaaaaaattatttcagaaacattttacacatcagatcctgctaggcaataaagaaatcattcatttaattttgtcctccaagtgaatacactaggatcaaattatccctagtagacaagtgttcatttgatcagactgaaagcttaatagctattttacattgcacagactattatcaaagtattaaaacttttaacattacacaacttgtttttaattaattggaacccacctcttttactggcttcttatattctcctaagtttggacagatgtttactatcacatatcattagttaattgatctgcattcaacaattaggattgtctacagaacaggcaattggcaatggtaaggactcatgtctcctaaatgatctctgtggccagagtccagttccagggctgcttagaaagtgatgacaaataacatgtttgtgccaatgacatctttgtgacagttttgattagaggggtcccagacctgaaaacattccctgctagggcctgtaacacaatgttacctttagtaagagggatctgtgttctggtagataaggcaaggtcataaaggtgaaggtctgacagagattaggagagcctgcaattaaatggtatgaaaagagtcctaaataatcactgttcagagcttccaagtacttgactaaacaaagagacccagaaaactttgtatttcatctgaaaattgctttaaatagtgaaaaactcaatctttgtgtatctttgtatctttgtataagtgcaaagcactgcacatatacttgcaattgttgccttcaataacacttttgtgatgatatccagatgtaaaataatttacacatgatacaataaaatataaataaataaaattaaatgtaatcacaaacccatcttcatttcctcaatgacctgtttcctgagaagcaatgtgctatgaaatacggagagtggcctctggagtcagctgggcctgggtacacatcctgtcttaccacaccttgaaatcactgtgatttccatgaactgactgacaaaaaccacgaggatgtaaggagggtcagaggctgtcttcctgtctgtaaggctgagctcacatccacctcacaggagcattatggaaattcaagactacaacacatgtgcccgatgcatgcaacgaaaaaatataacatttcacttctctaactgtaagaaaaacctacattttagattgaaattgtttgagctttagatttgaaattatctgaaatcaagactattctaaaaagaaaatcaaacatatgaccagaaatctaacatgaagcacgtacagagaattgatagatgcttttaaattacactggtagtagagaaaaatgtaacattaatttttatgctctaattataagaacgaagggcattttagaaaagacatttgccccctctcttagagccttccactctggcccccacaatgccttacagagcaaacctgggtcagactggatgcaacctgtgactcccaacagagacaaacaaagcaacgttcaggatgctcagtactgcgatggaatgccaagacacagaaaagccatgtgtcaagaaggggggagttattctttagacacatcctggtatatgtttatcattaaagatcagtggcttttgtaagtctaaaaaattaagccttaaatgttttcatcacattccagttaactacctgattagtctaggttatattaacagtattatttagaatttcaccttgaaatgaagatgtctgtataacttttacaatgatgtaaaacaaagagtaggattagggaggccacaggctactggtgcaatagctaacgcgtctgactacggatgagggaatttagcctggaataaggagcttttatttccagcttagtgatgcacacaaattttaaaaataaaataaaatcatgttttatgtgattcatgtttctcctaatgcaaagaagatgggtactattaataaaaatatctttaaaatgtaagggctaaggccccagaagttctgctatgattttttatgtttcatagagtgattatcatcacagaagctcaagcattacataaatacaaacgtgtataccccaacctggcaattctgcttctggaaatttatcttcaagtccacccgcacatctacaaattgatgcatattcaatattatgtactgcagcactgtttataagaacaaaagactggaaacagcctaaatttccatctacaaaagactaaataaattaaggtacatccctaaaatggaatattatgtggctgttaaaaaagagagagagagaaagagaggaaaagcaagaaaaagagaaaactttctacattcaaactaatagtagaaaactctccaagacacaattttaaggaaaaaaaatcaaagtcgagaagactatagaggaggctgtctttagtgtaaaatagttgaaaattataaatatattcatatgtttataaagaaattttaggaggctataaaaaaacaaagggaaagaggaaaaggaggtgggaaacaggtgagtaagatgcatggcaggcatatgtcttcatcttcatatgcttttatttaaaaatgttggaccacgtgtacacgttatctattttaaaaattagattttaaagtacaagcaagaaaacaagaaaacgaaagcttaaaaagagcacgtggaactaccagaaaaagatactaatccatggagataatggcaaggtagctcctagatgcactgatttctctaccacattgtataaacaagccatcaactatgggatttataatttaaaatgactctatttgaaacaccacattataaaaagccattaactaaatctttaaagtgactgtaaatgatgacttaacattttaaagagatacagtcacatcgcatgtgtgaatgcagtcatctgtataaaatgtcatcattaccttgatcatttcttcttctcctgctgttttactttttgcttctatgtcctctgcttcactgtatctaataaagcagctatttgaggtcgacaaagccattttcccctaagtgaaacaaaataacaaaatagccatgaggatacttcttgtagaagaaacattaagtgtttacactgaattaatttttcctccctgatttaaaaatcacagaaaagaacttagagaaaaacctgaaaaatataataaaagaacatatagaaaaggaaaccaaaatcacctttcattttactattcaaagattaccacaataaacatttgtagcatatcttcctagtagtactattctaattagatgaggtaggattgcttcctttctaaaagacctactgaagataaaactgatttagttctgtttgaaaaattaactttaaagatgagaacataattatgaatgcatactttattcaaatattagcattttaagtaaaatttattttcttcacaattagaaaacatgaaaaggtatatacaatgcctttggtgtttttaatttaagaatcaatgtctgagggacttttgtgtgtgaaaataaatattcatatacatttttagttgtttaatgtttgatgtattacactgctttctattaaacaaaactttaaaaactgattttcttgtgtatctaaatctgggttataaatttggttagcttaactcctgtaacaaatataacatttatttataacttgtatttggttgattcttttggaaaacttggaataccataacatttagacaaaatagttataaatacaatgattacaaaatatgttaaccttatatcacatccagttaaaaatgtgctgataacatcgatttaatttcttagtcaagtcacaagggctgggtggtctctcatctggatggctctgggtgagccctggaacatggtgctggggtccaaggcgatttaaacctgtgtcacaggttattcagctgagtcctttttgcaagagagttttaagaccctctttcatttaaatttaaatttgtgaaacttagtgtccttcctaaaaataaaatgaaatgaactttcctaaagtgttgtattattagtactatctaagtcatcatcctggccttatgaaatattggcattttctactggtgtaacttttattagaagcatctcatcgtaactagtaggatcatctcaaaggggttgcaacacattagcaggtaatgaaatcaatgtagtgtttcctgaatggtattgggtggggggggggggggaaggaaaacacacagatacacagcggaagggtaaaagagaataataaatatcaaagtgcataacacatggataagtaaatattgttaagtgcaactcttgcttcagttatacatatgtgtgtgctgggctgcaatgtaaaaatgcatttctcaatggattgggtcaaaatagttttcaagtcactgacttaagattttatcctaggggatgaggaaattagtctaagtgattacctctttctggtgggatgtttgtttaatctgtcatcttagaaaacactgctgagttcctattttcagttcattattgtatactaccaaagctgctactcaaaggctgagcttatcttctatttgcttgttctgtgtggtgcccactggtccttactgtttttgatatagctatctactttttaaagacagtttagcactcacatatttttgttcaatctttacttctcacacagaaaaaggaaattatgtattctgtatcaacaaaacatccatatactacaactacttactaaaattaagaattagtatactatcttttttcttatattaaatcttttcatacactattttaagcttatgaactgaaagtcttttagagataatttacttcaatgaactattattatttatattttatatgcaaattgtcacaacttggtcttagctagctccactgttcacttacagtctgtaatgtttctgaaagcatccatgatttctgctacaaagaagatacttaggaacaattctgttttcctactctgtgacctaaaattgactggttcttcaatggaaattagatccatatctaggcactaagggtatacagaaataattgtgggcaaaagtactaatgctatttttgttgcactatattttgagatctctttaaggctttatgttctcactgatttattcctatttaatgtattatactattgcatcctactttttctttttaaatatattatgattgactgttacagactttctgttaaattgacagggagtttttataaacaataacagcacttacaattttaaagactggttcccattgttctcttggtccaattgcatctgaacgcccaacaacaagttcatctgaatttataccaagatattttccatagccagatttcagggtgattctgtacattaataagatagataaaagttaaaaactgagagaaaattaattatagggcatcaaaacaggacatgtgtatgtgtgtgggtgtgtacatatctaaaatttcagactggacatatttcaagtgttcaaaagatgcatgtggctgagtggtgactcactcctgtaatctctgtgctttgggaaggcaatgggagaattgcttgaggcaagaagttcaagatcagcctggacaacatagtgagaccccatctctacaaaaaatttaagaagttagttgggcatggtggtgtgcacatgtaataccagctacttgggaggctgatgcaggaggagtgtttgagcccagaaatttgaggttatagtgagctatgatcacaccactgccctccagcctgggtgacagagtgagactatgtgccttcaaaaaaaaaaaaaaaaaaaggctacatgtgactggttgttgccatattggacactgcagatttaaatttagttttatattttgcttttttaatataaacattgtaccttatatattacataacaaatattttcaaaattcatcattcttcaattatatctctttagttataaacttcaataataaattactaaaactatgtcatcaaactgttttccagaaaatgctgcttccatttacattcttacctcaaattaacagagtatgttttgtatcatggatttttttttaaacattatgactctaaaaaaatactcgaaaacctgatatgaaaaaaacagtatcctattaatttgcattttagtagttaactagaataacaattgtttttcttttcctttcctttttactttttagattatctggtaatgtcccttgtccatttttctattcagatctgattgttcgcaatttttctactggggtcttcagtgctatgaattctatacaagatacatatgaacagtaagaactcactgcctattaagattgttgcaaatattttcctcatttgtcagttgattttctttataatccttttctgtttataattgtaaagcagtttaaaactattgaattttttcttcctctgcttttattctttgtctttcaccctacttatcagactttcaaagaaagagtagaaataatcatcttaatgtgattttttaaaattatgatttcttttaccttaccaagaatctcctcggatgccagaattgacttttactcctttatacgttaatgattgtataacagaaatcattatcatgttgatgtaaccaattactaaaatatgtaaattcactttcagtatcttttacccaaagaatcattctatacttctgcacaaggtgagaataaaaaaggttactttataaaatgactgtaacaatagtgagtaaaaatattattttggtcattatgatactgtaacattctctgctggtttcaacaaatattccttttttttagtcttcctgtttgtctttagacttcgaaacagtgagtttaaatatcataccaacagtgaaccaggttttgtactatttgatatattttataatctatcttatttggtgtgtgaaattattaatcttcattttttaacttacatatcatttttccagcctagcattatatattgataggaaatccactaaaagtagatcacaaaatctacttctcaaaaaagctatttcattttttatatctaaattaccgtgggcttaagacagatagtaaaatttttaatgaatacaattaaatttttaaaatcactggttactaattatattacaacttaagctcacctggaatcagataatttgacagccgaaaactgctctggaggactagggccctcatcaactattggagaaaaaacatttgaaaataaatttgacatttgctataaatataaagacattattttgctttaaaaatgtggctattttcttctgcaattaaatgtaagaatattcagatatactgatgtcactgtaatactgtatctttggaatcaagatctattttaccttcttttaactacagtgctaattttatacactgagtaagacagggtgatataatgtttatttaataactttcgagatagcttctctttatgttttaaaatacagtcgtaaataagcacttatttaaaaaagctaaatgctttcatttattcaatggatggccttgctgaccaaatgatactgctttttatcttctaattacttcgtatctcattagtgcttcctctaatgggcaaggaaaatgaggaaacttcaaattgttaaatgcacccaggttagttttggtaatagctctgaataaaaaagtaattcaaacatgtttgactcaaataggttttcttttttccttccacttactattttaattattcatattcttattatttccaaagatactcttctggaactacacggaatgttttcaaatgcttatattagaaagagggacttgccaatggctggtaaatattaaggaattaaaaaaaatggaagagtaaaatgcaatggttccattcctttggaaaatgtttgagactagttagagcctggcctaagtgaatgaatgtcctaaaatctacacttgtggcaggatcttcccttccagacacaaaccttctttgtgtggagctcccagggtaaaaagaccattatcgagtgcatgtatataggttccctcatccatttcaatggctatggttcctgaaatttcaccaaagtttgttactgtccaccagattcctaaaaaataaaattgatatttctactttatattttagttttgacacagagttcttttttattataacttagttttaaaaactttttattttgcagtcgtaagaaataatacgaagatctcacatatcctttactctctttgtctcgatgacatcttgcataagtatcatacgttgttagaatcaggaaactgacactgatataatccatgaagcttattcagatttcaccagttttacatgtacttgtttgcatgtatgtgcacatattcatgcaactaccagcacagtcaggattaggtttttaaaatacaaaatagcaacatacagcaaacccagctactcggggagctgggaaagaggatcacttgagcccaggagttcaaggttatagtgagctatgatcatgccactgcactctagcctgagtgacagaacaaggtcctgtctcaaaaaaagaccaaaacaaaacaaaaggcaacatgtgaaggtacaaagtgatatatggagaacggtctctctcatgatagaccccagccatctattcatgcctgctttccagaggcaatgcctatcataatgcttcttaaaaatgcctctacaggaagactttctagcatagtaatctttttttttttttgagacggagtctcgctctgtcgcccaggctggagtgcagtgacgcgatcttggctcactgcgacctccgcctcctgggttcaaacaattctctgcctcagcttcccgagtagctggggttacaagagcctgccaccatgcccgaataattttttttgtatttttagtagagacagggtttcaccacattggccaggctggtcttgaactcctgaccttgtgatccacccgcctctgcctcccaaagtgctaggattacaggtgtgagccaccgcacctggccagtaatcttaactacaattttagattgaaagtaaaatgagcagaatctatgtctatgtatactaatttccaatttgccaatagaaatgttagactctagcaacaattattttagcagttgtcataaaaatttatatcttaatgttaaaaaatatcctcaaacctcctcctaaattgtactttaactagagtagaaatgagtcaatcattaactggatatgacatattaaggaattcttgttaattttacaaggtctgataatgacatagtataacgtataaaagtaaagaacaaaacaggtgatgagagaaagacataccatgttaagaaatgtacatttatgtgcttatgggtaaaatgatgcaatatctgtgattttacttaaaattttctaggaaaaattgtgtgtgggagtgtgtatgaaatgaaacgagattagcaaaatattgataattaatgctggggcctgggcacatgggggactcattatattcttctatgtatggattagtttggatatttccataataaaaaggttttaaagattcagttaattccactgcacaaaattttctattcaactaaacatttcatgcttttcataatcaattttaaaatacataaaattttagctaaaatgaagttggacccttatctaacaccaaatacaaaaagtaacttaacatagaccaaagaactaaatgtaagagctaaagttagaaaacttttagaagaaaatgggaaaagcttcatgacaatgaatttggcaatgatttcttatatagaacatcaaaggcacaggcaacaaaagaaaacacagacaaactggacttcatcagaattaaaaacttttgtgcatcaagaaccactgtcaacagagtaaaaggtaacccagagaatggagacaatatttgtaaactacatacattataaggaattaatatccagactatatagagaactccaaaaagacaaataccacaattcaaaactgggcaaaggatatacacggacattcctccaaagatgatatacaaatggtcaataagcactcgaaaagacgctcaacatcactagtcactagggaaatataaatcaaaaccataatgcaatgccacttcacacccattagaatgctattatcaaaacaaacagaaaacagaaaccaagaaaaccagaaaaacaaatgttgggcaggatgtggagaaactgaaaccctctgcaatgctggtgggaaggtaaaatggtgcatgtatttaaatgccactgaagtgtacacgtaaaaatagaaaaattggcaaattctatactctgtatattttacctccacacacacacaaaaccaatggagaaaaagaaaattagtcaaaattaaaatttcagctacagacgattggaaagcaataaaactaatgacaatttaggtggttgagttatagctacaattgttttcagtaaaggaaataatgctttattcagaatcattatgaacagtgttatgattaacaagtctttcttataaatgtaatagttaataattttaaattagttttattttgtatgttctatgccacgttcaccaagtacacttaatattaaataaaatcatttaaatataatatctcattaatgttttgcaaatgaagaagaaatttctggcagagaagctcctcaaaattttcaccctctgtccaagtaggaaaatgatacaataatattacttataatattgtcaactgaaaaagaaattactttgagcagatgccagtatttcttctcaatgagatttcaaagaataagaaagctaaacacagtatcatcaagaattaaatgtgagcattctgcctactttgtgcaagtggcctacattcaacctttggaggtatgctcatatgtttaatgactaaagtaacataacataatacttaacggtgccactcgggggttttagctgtgaaaaagcagtggatcctaagaacagtgggcactgaagttgcctgtctctatgtcaggttacagctcaagctgtgtatatgctgcagacgcccaagctgaatttaagagaatccgctctaaaacattacttgctatttagacacatgcttaaagttatttccttttaaaccttaggcagatggtgaaacattcccgctgtgttgttgtctcacaatgcataacaaagcttttcacatattttcacatagttgagaatgtttccatacgtctggcatgcctgtaatccagcactttgagaggtggaagcagaagaatcactcaagcccaggagttcaaaatcagcctaggcaacaaaaggagacccctatctctataaaaaaattaagaaattagctgggtatggtggtacaagtctgtggtcccagttactcgggagtccgaggtgagaggatggcttgagcctacaaggtcgagggtgcactgggccatgatcacgtcactgcactccagcctgagcaacaaagcaagagcctgtctcaaaaaaaaaaaaaaatggcctgatgcaccagtgtcatggctgataagatactcccagggcaccctcattctagcatcaaggctgtgagacagctcacctcaccttctgactaacccagtgcttctgtgctaagggcccccttaaatctctaccttcattatgtgcttggcacaaaggaatgatatatcttagattcggaaatggaattttattcccaaatcttactgtagtctaagtacccttcacagaccttctattaacccatagcttacttagctttagttcctgggtaaatcaaatctgtgttttgcaaactacgatgttgtaagtcaattgcttctgaatctagcagagctcagtgaaactatttgcttacagacatgctcatttttattaatgtcacacatggtattctccatgtgaaaaacagaatttctttcatcctgtttaccaatcccttcagatccttgtgaggaaccaacagaacagctttaaaaaattaaaaggtttttttctttcccttcacaaataggcacatgcttatttttacggcgagtttagaaaatccacaatgcaaaagaaggtggaaggacaaagagaaaaagacgcagaaggacttcctcttccagccaagatggacttgccctcccaccatgaccaatgagaaaactgaaactggacagaatatttgagagaactgtttttggggattggaacacaggcagaacaggactgtgatatttgagaacaggaaaacacaggaggcaaatctaacacacacttctgttttctgcccaatggcagtttcttgatgacgcagagagaggtagagaactccaaaaatgaggcaatgtcactgtcactaagctgagagtcttgcagtgctaacatgtttggagtttatagaataaggtactggagaagagggtgaggcctcaaaagagtatgcaaaagttctctgcaggtctggggccaagggctggggggagtgcatacagtaggcaggctccacaaggcccatgcagagtggctggcacttctgagggctgactggagatgccagagatcacacaaatttgggacatagcagagtggagagaactcaccaaatatacctagaacatgtggctgaggcccatgaggatgaaactttcctagagtaagagtcactgtctaagtctacaggcaaaaacctaataaataagcacaaactaacaaaggcccaggcttgacaggagcaaaagggtggtcaaataatttaactaggcatcaagacatttaacagaaataaaggttaaaatgttatgaaaatgaaagactgaatttataaggaagacttaacaatcctaaatgtgtacacatgacagcctcaaaatactttaagcaaaaactgctcaagtagacagatctagaattacagctggagattttaacataactctcaatacattgtaggatgagtgaaaaatcagtaaggacacagaagatgtccatagtcacaagctccaccagttgatataactgacatctaaaaaacactgaactaccaggcgccacagctcatgcccgtaatcccagcactttgggaggccgaggtgggcgaatcccctgaggtcaggagtttgagaccagcttggccaacgtggtgaaatcctgcctctattaaaaataaaaaaaaaaattagccaggcatggtggcaggtgcctgtaattccagctcctctggaggctgagccaggagaatcacttgaacctgggaggcggaggctgcagtgagccaagatcacgccactgcactccagcctgctgggcaacagagcaagacttcatctcaaaaaaaaaaaaaaaaaaaaaaaaacaaacaacaaaaaaaccctgaaccaacatctgcagaatacacatccttttctagtgtacatggaaattcgctaagaaagtatgttctccaactatactataagtgaattagaaatcagcaacaatatcatacctataaatctctatgtagtagaaattaaaaacagtacacttttaaataactcaagtgtccatgaaaagaaaaatcacaaggaaaactagaagatattttgaatggaatgaaaatgaaaacaaaatgtgttgactataactaaaactaacatggaatgaggagatctaactcccttcttaagaagcaataaaacaagagcaaagtaaactgaaaataagttaaagggaggaaaaaaaaaagactgaaaataaatgaaataaaacatgaaaaaaagaaaaaataagtaatgttgaaacaagcttgtccaacctgagggctgcatgtggcccaagccagctttgaatgcagcccaacacaaattcataaactttcttgacacattatgagacttttttgctttttttattttttggctcatcagcttatcgttagtgtattctatgtgtggcccaagacaattctccttccattgtggcccagggaagctaaaagattgaatacccctgtactaaaagatcattaatgatctaaaataaatgatcttataaagaattgataaacctccagctagactgactgatccaggaaaaaatggaaaaacaaaaattaccaatatgaagagactgcaatacagattagattctacagacattaaaaggatattaaaggaatattctgaacaattttatgccaataaatccagcaacttggatgaaatgaaattttcctaaaagacacaaattaccaaagctgacaacagaaaaatctgaaaatatctcttaaaaaatcttaattttccctcaaaatctaaaaccaaaccaaacaaaaccctctaggttcagatgacttcactggtaaatcctatcaaacatctaaagaagaaatcataccgatcttacacagctatttccaaaaacagggaaggagacagcacttcccatctaattttatgacacccaatatcaccttgacaccaaaatcaaataaagccattacaagaaaaggatacaaaagtccaatatctcccatcaacaccaatatagaaatcttataaagaagaaaaacgaacacctagaaatcaaatctagcaatattccaaaagacaacgcaccacaaccaagtggggtttatctcagggatgtaaagttagtttaaaagttgaaaatgaaaccaatgttattcaatggcagaatgaagaaagttgtataatcatctcaagagattacagaaagaggcactggacagcattaaacatcgttatgataaaaactcccaagaaacaaagtcctcattttgataaagtttttctctgcagatcctacagacatcataccatatggtggactactaaaagttttctgcctaagcttggaaacaatgcaattacgcccattctcgtgacttctgttcaacactatggaagtcctgaacagtataataaaccaataaaaagcaagacaagacataaggattaggaagaaagaggtaaaatgatagtcacaggaaacataattgcaaatttcttagttttctatataaacaaatcattagaagtaagaagtgaaacagacttatcagactacaaagtcactatacaaaaatcaattgtatatctacatactgacagcaaacaactggaaaatcaaattcaaaagttctactgacagtagtgtaaaattataaaatacttaagaataaatttttaaacaggcatgcaagactgctacattgaaaattatgaaatattgaggcccaatattaagatgttgattctcccctaaattatctggactcgatactattctctgagaaaatccaacaggcttcactgtagaaattaataaactaatagttagtaagtacaaagttggtggacacacactaccttatctcaagacttcatgaaattatagcaatcaagagaaatataccaaaagaaaaacagacaattgatagaatagagtccagaaatagaccaatacatagaaagttaattgattttttatgaagatacgaaactggattaatggaaaaaggaaacaccagtggtgctggcacaaatggctatcaagatgttaaatttaaaaaaaaaaagtaaatcttgaaaccaaactcacaccatgccaaaaattaatttgagattagtgacagatttaatgtaaaaattaaaactatgatgcctctaaaagacaatgtagaatattttcctgattttggggtaagcaaagatctcttaggtcaaagagataaggcagtaaccataaaagaaaaaaaataaactaagatttataaaaattaaaagcttctgaccatcctggctaacatggtgaaaccctgtcactactaaaaacacaaaaaattagctgggcgttgtggcaggtgcctgtagtcccagccacttgggaggctgaggcaggagaatggcgtgaacctgggaggtggagcttgcagtgaaccgagatcgcgccactgccctccagcctgggcaacagagcgagactccatctcaaaaaaaaaaaaaaaaaaaaaaaaaaaaaaggtgtccatccgaaaaccaccattaagaaactcagactgggaaaaactcagactgagagaaaagactgataacaccatcaactcttggcaaggatgtaactggagaactaattcattcttggtgggagagtaaaatatcgcaaccactttagaaaatttttggcagtttcttatatagttaaacattcacctatcctttgacacagcaattccacatctacatatctaccctagatatttaccctaattttagaattgttgatttgccatttcaaaaacaatgattcttccagaatattagctttataccattccatattttatatattttttaagctaccataatttatgaagattcaaaatgcaacttaccaagttttaaaagagaaaaaaaagtatggaaacagctaaatggaaaacaggctggttaagtgtgtttgggtcaatttatttccagtatcatttacaggctaccctgatattgtatttaaaattttcattcatttcagagttcacaaaataatgatttttcctgtgaagatacttcgtttaagagacaactgacttctacaactaaaatgtatacatgttcaaagaaaataacttgtaaaatatatttggttgaataacatttacattaagcctttaaaattatgtatcagaatctccggctattaagcagtctaatggtgcctactaagtcagagagttgtaattcttctctcctgtgctctgttctgataatgaagtaaaggcatcagtagcatctactgtgctaaagaataaatggaatttgcaactgtaggtaatatttaagcactttaagacaaatatgaatacatcataaatttctaactaggaaaatattttcaatgagatctcaagaaatgttaacttttttcagaataaagcattgaaaactgactcaccaacatatcaagctgggtttcttcatcttcttctctttttcttttcttatctttgttctttttcttcttactacaggacataatttatatagatgagtttaggtatattgatttgtgtgataaataaatatcataagattgaaacttggaagtcttttaagctgtttcatttataaattattgatttaggaagacttacattgctatgctctcttaaatacagcgctgagaatttgcttcaggctttgtacatattatgttaaagttcaaagcagattgtagagccacacttccagattttaaatcctgattctgtcacttcttagctctgcaatttttggaaaaagtactgaatctctctgtgagtcagtttccccacttaaaaagttaggataataacttaactcttaaggctattgtgaggattaagaggtaatatgtatcttcacacattgctggtggaaatgtaaaatggtgcagcatctacaggaaacagtttggcgttcctcaaaaagttaaagagttaccatatgacccagcaattttactcctaagtatgtatacccaagggaaatgaaaacttactcccacaaaaatacttacataagaatattcacactagcattagtcacaatagtcaaaaaggggaaacaacctaaatgttcatcaactgatgaatggatgaacaaaatgttacatccatacaatggaatactacgcagccataaaaaggaacaagtgctacaacaatgatggacctcaagaatgttataagtgaaagaagccagatacaaaaggccacatgttgcatgatttcttaggaaatattcagaataggcaatttcacatagatagcagactagtggttgccaaggactaggagagggggaggatgggatgtgactgctctaatgggtaggaagagatttccttctgagatgacgaaaacactgagaaactagacagtggtgaacctcttgaatatatactaaaaaccactgtacaaaagggtgaattttataattatgaatgacatcgtaataaaaaaataaaaaaccaagagcgacttgaaaaaagttaatgtgcaaagtgcctacaaatatttcttggcacactgaaagtgctatacaagcattaattatgattattacgataatcttaagacactcttgtctgcattatcatcataaagttttcagaagataactcaccactcctcacaggaaattcacagagtaaaaatctcacattcattcaggatatacctgccacttattctggcatcctcatgagcccagactcctcgagagggttctcaagggcagtggcttcagctcactccttgatactttctttccatctcgcctaaaaatatcaaaacctctgtttatcacggagaccaggaggaaatgctcaatatttgtatgtacagtcaacctcgggcaaatctgccagttaaaaaagaagcggggatatgagtgcacaggtatttttctcctaaagagctaataaattaccactacgacctcctcctgacatttggctcaatttatttactgcatatatgttctctcatttaatcctcacagtattctaaaggtataaaaaatggtctgaaagtataaatgtgtaaacggaggttcaaagatatttgatctcttaatgagtaaatggaagttcagacatattaatcaatttgccacaaattacaaaattagtaaatgacagagtgcaggttccaacccatatccctatcaaagcccatatacacctcaaccactgtgtgattcatcctgatttcactctacatattagcttagaaaaaattaatcaataacttttccaggaagagacaatggagaaaagaataatccctaataaaggaagttatcatcatgagctacaagatcagactaacgcagactcaccaggcagaggcctggagagatgcctcaggggacccaaactcgtgggtacggggccacgggtcacccgcccgtctatcctgtttccagggtcgtccgcgcgggaggctgcccctctctgcacaggcgccaggaaccgctatctggcctccatccagcccggacaggcgccagggcgaagcctgggatgccacaaagccagctctccgcggcacgacttccaccggattcgcgggggtggagtgcgtccgaaaagaactgagaaggctcccgccagagctgcaggacccacctcttcgccttggttcccttgaacacgagcttggtagtcttcacataggagtactcgactctcagaagtcggctccgggagacttctgcgcggagaggctgaagccggctcaggacgagtatgtgacccggagcagcaccagggcggggaggaacagaagtggaggcaaagtaaacattccctgactgggtacgtctgtccagaacccgccttcatcttgacccaaacgctgaatggctgagatttccacttccgagtttctgctggggagctacggcggcctcagagggccgaaaggtgccgcaggcagctgctccctggctccctctcgaggagcccctgaggattcgtgcctccccgaggggagtaaagtccgcccgaggcgccggtactggcggtggcggggctgccgggcgcgctgtgaaacggcctaccgctagagctgcgggctggcgacggtccccgcgggggcgggaagcggcttaggctgccttcgttggcctgcggcggcgcggctggaagcgcgggccactcgtgcgcgggtcactcggggctgtgcctcgtgcgactgtgtgtgtaggcaacaagcaggaaataccctaaaatagaatgaagcaccatgttgagggccgcggacgtcgcgagtgctgtgggaatgtgggctgaggtggagagttatggtggcgcgtgttacaagctcaggggtcaggaagaaggctaatcgtggaggcggcatctgtggagggtcttgaacgctgggcaggcttttgcccgatagagatagaggaagctagtcctgtctgatggaggaaacagggcggaggcgtggagggagccgcaagcaggccaggcctgtaaagcagagtgatgggaaccaggatagagaaggcaagtcggggtcctgttttcgctgaagaatttgaatgaaatcagtaaacaggtgagagggatccatcgcaagagcatgggatgaaacgaggagtagtccacggtgattcctctgcagcggtgggtattattcatcgcgtatgtgacaccaaaacggtgggtattattgatcgcgtatgtgacaccaaaaccaccccactccactcaagctgtggctctttccctaaagtagaaaacagagaccagttgggttccaagcatccacgaagatcttattaaattcgtgatccctggtggtaccatggagtcaggattggctcatctcaaacctgactcagaaacaaaaccatctcaatgtgcagagatgagcggccttacccgctatcataacatatttactggtgttatcacagtgctgcacttcctaatccccattccagggcaatccacatgccatgatgtccagaggcattaacaaaggagacacacaggggctcctcacgtttgctttccgcggttttgatgaaaatctcagtttcctcacctcatacaatgtggttagtaatagtaccatttagggtggaagaattaaatggtaagaattatatagggtgcttattataacctacatggaaaatgcctaggatatgttagctatgctcatcaccaacatcgttatatgatggtaataatcagatagtcaggaaggccgacaccaagaaaatggatacttgctctgagggaatgaatatggagagatcagaaggtcaagaacaaagccgtacaacatgtctgcagtaaagggatagagaaaagaaaggctataaaagaaggagtgaaacagagttagagtaaaagtataaaatcaaagctaaggagaatttctagaaagggtaatatcatttaatatcatagaagtttaggagcacaagatggaaaaaaggccggtgggtaactgacattgaggcagtctttagggaagctccatttccgatagagaagtagacagaaagtcagcttgaagcagggactaggtgaagaagctgttggctggtcgcatggggaaataaataagggatggcttatgccatatttctggatttctttctttcttgcgcagcctctatatatgcatagagtttggcaaaaacttacaaaaaataaaaatgaaaccaatttcatttgtagactcaaatacaatgctttgtgttagaatcaagataaattcatgtctctcccttctattgtcacagtcagttttgaaattaaacatcagcttttcttcctcattaaaatcattttcaactcctcccaggtgttgatggtttgggggagttacataaacagtcaggtcttgatgagtagaggaggagggaacaaacactttcagcaagggcagaattctgaaattctgctcatatttttctccagtaactttcctatgtttgtgaggttattcagtcataaagatcctagtgacatttttttcaagcttgactaatcgtaatcactgtggacgtttgtttaaaatgtgtattcccaggcctctcacctgctgattctgattcagaagatcacggatgggactcagaatacatgtgtttgacaagtaccacaagtggttcttatggtcaggcaaattttggaatctaaccaggaatttatgtttttatgactggcagctagaaaagattcctagagtctttgctttttgaaaataaaatattccttctttaaaaggaaaattgtatgactagatacaacatttatacgtgtggcacatgtactatatggtgtgcttttgtcatatttacagttaaagatgtgtaagaacactctgcaaaaaattatatattaaatgcaaagaggggtaagtcagggtgggggagaaatgggaagggtgtgcttattgttgctaaaaggtagaaaagccagaatgatagccatctaaggttgcaaatagcacattataagttgagggagcttcataatcatgtctgaaaccttctttgatatactgagttgttaacagtggctttggacaagatttgagggagaaaccaactatgctttaaagtgttcatttaaaaggctttaattaaaggaaagtctttgtatttacttgagctaatttaacttcaggactttaataaattactagcccttaacctcttaaaaattgtctttcatttcaaatgaaagtttaagatggcctttatgttcgattggtatacttgtgtgaagacttaacagcaaggtactatacatttctaaatgtttacttcttaattttgctggaagaaatatactactcaattgattatttttaaagcaaagtaaaacaatttattttgacaagcaacactgtattctcccagttttctggtggcaatgattaggcttaacatcactaatcatgagagaaatgcaaatcaaaaccaaaacgagatactatcctacaccagtcagaatagctactattaaaaaatcaaaaaacaacagatcttgggacgctgtggagaaaagggaacattaatacataattggtgtgaatgtaaattagttcagccactgttgaaagcagtttggaaatttctcaaagaatttaaaatagaattacctttcaagccaacaattgcattactggtatatgacccaaagaaagtcagttattctaccaaaaagacatatgcacttgcatgttcatcacagcactattcacaatagcaaagacatggagtcagcctaggtgtccatcaacagtggattggatcaataaaatgtggtacatccacacagtattattaggccattcttgcattgctatgaagaaagacctgagactgggtaatttataagaaaagagatttaattggctcatagctctgcaggctgtacaggaagcatggtgacggcatctgcatggagcttatggagtctccagggagcttttactcatgatggaaggcaaagagggagtaggcacatcacatggccagagcaggagcaagagagaatgggagtggggttaagtaccacacacccttacaaaaccagatcttgaaagaattcgctatcacaaggatggtatcaggccatgagagatccaaccccatgacccaaacacctcctaccaggccccacctccaacactgaggattacatttcaccatcagatttataggggccaccttccaaaccatttcacacaccatggaatactacgcagccataaaaataacaaaatcatgtcctttgaagcaacatggatgtagctgaaggccattatcctaagtaaattaatgcaggaatacaaatcgaaataccacatgatctcacttataagtgggagctaaacactgggtacttacggacataaaaatggaaagaataaacatcgggactactagaggggagaaggaggaaggcatggtttgatgaactaactattgggtactatgctcatgtattaatctgttctcacactgttgtatagaactacccgagactgggtaatttataaagaaaagaggtttaactgactcacagttccacaggctgtacaggaagcatggctgggaggcttcaggaaacttataatcatggcagaaggtgaagggggaagcaaggcacattctaccatggcggcaggagaccaagtgagccaggggggatgttccatatgtttaaaccatcagatctcatgagaactcacttaccatctaagaacagcaaggggaaaatctgccctcatgagctaatcacctcccaccaggtcattccccctgcattgggaattacaattcaacatgagatttgggtggggacacagagtcaaaacataccaaaccagcatctggatgatggagtcattcataccccaaaagtcagcattatgagatacacccatgtaacaaactggcacatatacccctgaatgtaaaatacaagttaaaattatcttcaaaataaattaactaatgaataaataaatatgattaaatgaaattaaaattttgaattaaaaaaattttgagagtgatttcagcttgacagttatgtaagttatgtaaatgggaacagtgagttctgtagggttcagatcaattgcactatctgtactaagttgatgtccagttgtttggatgaaaagaaaagaggagaaacatatagatctaacaggaaaaaagtggacaagtttttatgatagcaaaaagaagaatggaggaaataggaatgaggttatagtgattgatagatattaatagacgactaattcaaaagccaccggttgcagaaaatattgattaattttgttttattccagtcagacatcaaaatcctataacctgcctctagagaaaacccttttagccctgtaattatctttattccaagcaccattccattcattaagtagtgtatagggtgattaataagtgaattattcacagaattaggacagaatttttgagtatttcaggatattaatctatagtcaatgaactaaaataaaatttgactagaggtgtgatcaccatgaatgccatgttggtatcttgttagatttggcaacccaaagttgacaaatttattaataaaataagcgttccttgatgattaatttacatttagtaaacatgctctttcttcttccttccctttcttattcattcattcattcctacagagcagtgactttcattctaagattcccagaatcctaaggaattcttgaatgtcatcatagggagccaggtgtgaggattcccaaaagttgtacttaatacttgaaaaatctcaaaaaagttatatatttacaccagaaaaagctatacaggttttaagttatatatatatagttaaatactttttatttctatccagaactaactcattagagttaataatgttgattatttcatactgacctagtgggtatcctttatatatcattgattacttattagtaaaataagaacccccccaaaattacaaaataaatatattttgtgggtttttcttaaggcttttgaaacataaaatcagaggagaggattaaaattaatccttgattgttaaaaagacagggaactactaacttagaaaattgtatgaaaacaggaagatatatacatggccctcagaccagctgcctgttttaataaagttttgttggagcacatccatggatctgtggtgctttcctgctacaatggtatagttgaatggttgctatagagaccgtatggtttgcaaagcctaaaatatttatcatctggtcctttatagcaaaagtgaacccagttttagaacattcacttcacaaattaagatacagtggatgctgccttaactgacttccacttaactgatttgcaatcagcactttctgctacccctgtacaacttattgactgatgtccactgcaaactgaaaacctttgagctacttttaatgcctgtacatttctccttccatcacagaaattgtatagtttctaagaggaagttgtgttcattcctaaatatgtttacaccatttgttcttgttcttgtagttatgtgatttaattagatattatgttgagaggctgagacgggtggatcactaggtcaggagatcgagaccatcctggctaactcggtgaaaccctgtctctactgaaaatacaaaaaaattagctgtgtgttgtggcaggtgtctgtactcccagctactggggaggctgaggcgggagaatggcatgaacccgggaggtggagcttgcagtgagcagagatcgcaccactgcactccagcctgggtgacagagcgagactccatctcaaaataaataaataaataaataaataaataaataaataaataaatattatgtaaactgagaaaatgagtataacaacagtagtattgttgtttctttgagaaataaactaaatgtgttggaaaaatgagaaactcaaacagctgctctcagcttaactgttcttggcaagacaactagaaacaaatgggaaaaattgtgtaatctaggatttcagattgctttaccccagttgtcttcacagaaagtgaacaagaaatcaatgacaacatatcattggcgtagtttccacaagaaactccactctgaatccgtgcaaagctttgaccttgtcatcaaaattctggcaaatttatttacacatgtcttttaaattaaagttaagttttaaggacttacatctaatacttcttatgattcctccatctaacttaaatttgtgattaatctgtttattactggtcccaatctgattgaataaggggctttctaccctttttgctaaccaaaagtttactttgatgaagatggaatcataaatacaataattcaagtttaaagaattagaatggtaatggttaatacaatttagtatgcctaaaaatcatttgtaaagcctactaacaatgcaaattcttctgccttaggcctgagattttgattcaataggtcaagcatggggcataggaatctgtatttttaggaatgataaaggaaaattgcttaaaatagggtaaattataacttacaaatataaaatgaacacttgtctaagatttttgtttaactcatttatttaattagggagccagtaagatgttatactgagctttatggaaaattaaaagagccacacatatctaggcactaaggaacactgaaataaatctgcttgataggttcaaaactgacttcttgatggaaggtggaaaaaggaaaattaattatacttccaccaaaatcaatcatttgcctgtctatagtcaagaatatttgcattactatcagtaatctacaactaacagaattgcaaataacaaggaaaacaaaagacacagagaccctatagaaacagataacccaggttattctagacaaggctgaggtttccattaaagacactcagtggtaatttcgttggtccatcttaaaatctctccattttctcctgaaacaaattgctcaagcaattcaaatacaatgaatgtggtcagtgggtcgcacctggagaaatcattttctaacctataatcaagactgttgaattactcccttcactggaaagaataaaatattacctcatagattcatattatgataatggtccactatgaatgctttggtgttcttaattttcttaagatttattaatatttctgaagtaactactgaatgccaagcaatatattttctaatttaatctttcattgacttttactttcacttcaattgagctactcactttcatggctataaacttaacttttcaataacttaaaaattgatttctaatgttataaacttttatgttccactctgtgacatgctctttcagactctctcttccttactgccaattcaccttctcttctatctcttccagtgccccagtatcttgactcttccattttcttttttcttttcttttattaagtggttacatgataatttcacatgttgatggggtacaatgtggtattttgatatctgacacattgttaaaacctctcctccctatctttcccagtctggtaaccactcttccactctctattagatcagtgtttttagatttcacatatgaatgagatcatgtgatatttgtcttaccgtggttagcttatttcatttaccacaatgtcctctatgatcattcatgttgtcacaagtgacacgattttatccttttttatggccaaatgtgcatatgatatagtttggatatttgtcctgacccatatctcatgttatattgtaatccccactgttagagatggggcctggtagggggtgtttaggtcatggaggtggatccctcatgacttggtgctatcctcatgatagtgaatgagttctcaagcttcctgactagtcaagcatatgttgacactatgctccctgtgcagcccatggaaccaggaaccaattatgtctcttttcttttaaattatccaatctcaggtatttctttacagcaatgcaagaatggccaaatacagcatatatgccacattttctttatcgattcattcattgttggacacttaggttgattcttggctattgtgaatagtgctgtaataaacatgagagtccagaaatctctttgacatactgatttaatattctttgaatatatacccagtagtgggattgctggattatgtgatgtctatttttaatgtttttggaagttatattgttttccgtagaaattgctctaatttacatttccaccaacagtgtatgaacattctcctttcttcacatccttgccagcgtttgttattttttgactttttcataaaaagcattctaagcagggtgagatgatatctcactgtggatttgacttgcgtttctctgattattagtgatggtgagtattttttcatatacctgttggtgatttttttgtcttatttggaaaaatgtctattcaactctcttgactattttctaatccaattatttgtgtttttgctattgagttgtttgagttttctataaatttgggatattaaccccttatcaagtgaatagtttgcagatattttctcccattttgtaggttgtctcttcactcttgtgattgtttcctatgcagtgcagaagtttttatttagagtaatcccatttgtttatttttggttttgttgtgcatgtcttttgatgtgtttctaaaaagtccttgcccagaccaatgacatataacatttcatttaagtattcttctactagtttcatagtttggggtcttacatttaaacatttaatttattttgagttgatttttgtatattatgagagataagggtctactttcattcttttgtatggggatatgaacttttccaagcatcatttgttgaaaagactgtctttcccccattgaatgtttgcacctttgtcaaaaataagttgcatgtaaatgtgtggatttatgcctgggctctctatttttgttccactggtctacatgcctgtttttatgccaataccatgctgttttagttaggatagctttgtaatatattttgaaattagatagtgtaatacctctagcattgctctttttgcttaagatttatttggctatttggggtgttttgtagtttcacatgggttttaagattttttttaatatctgtgaagaatgaaattggaaatttgatagagattatattgtatttgtagattgattcgagtagtatagtcatttcaacaatattaattcttctagtccatgaacatgggatatctttctatttattttaatttttttaattgtttttatcaatatttaataattttcatctttccatggcttaacttacttgtaggtattttgtttctttaatagctattttaaatgggattactttcttgatccctttttcagatagtgtgctattggtgtatagagatgttactgattttttatgttgcttttgtatcctgaaaccttattatattcatttattatttctgattctcagtggtgtatttagggttttttacatatatgatcatgtcatctgcaaagagggacaatctgactttttttttccaatttggatgccttttatttctttctcttacctaattgttctgactaggacttctagtactatgttgaaaaaagtgattaaagtgaacatccttgtcttgttccagatcctagagacaaaactttcaagttttcaccattcagtgtaatgttgcctgtgggttatcacatatgatctttattttattatgttcttttataactaatttgttaaaaggtttgatcataaaatgatgtctaattttgtcaaatgcttttctgcatctattgaaatgattatatgttttttatccttcattgtttaatgtgatgtatcagattttattgatttacatgtattagactatccttacctctccatgtaaataccacttgattatggtgaaaaatcttttaaatgtgcttttgaattatcattgctagaactgctggttttgaatgtttgcatctatgtttatcaatgatataggcctggagttttcttttatttgctgttcttgtctcattttggaatcaggaaatgctgtcttcatagaatgagtttggaagagttccctccttttcatttttttgaaatagtttgtaaaacatttgtataagttttttaaatgttttgtagaatttgtcagcgaaaaccaccaagtcgtgaacttttctttcttcctctatttttttagagacagagtctcactctatcactgaggctggcatacagtggtgcagtcatagctgactgcagcctcaaacgcctggtcttaagtgatcctcctgcctcagtctcctgagtacaagtacacaccactatacctggggaatttttatttttatttttagagatggagtgtcattgtgttgcccaggctaatcttgaactcctggcctctagtgattttcctgccttgggctcctaaactgtgagattacagttgtgagctactgtgtgaagtgaattttccttgactgagagcctaaatctctccttcagtctcattatttgtcattggtgtgttcacattttctatttcttctttcttcaattttgataggttatatgtgtccagagcatacgtttttcttctaagtttttcaatttattggcatataattgtttgtagtacttactcatgattccttatatttctctagagtctatcatagtatatcctttttcatctctgattttatgtgaattttctctttttttcttagtctgacaaaacatttgtcaattttaccttttcaaaaaagattccttcatttaattagtcgtttgtaatttttgtcttcattttgtatatttgtgctctgatctttatattcttttgctaatttgggtcttagtttgttcttgattttatcgttccttgaaatacattgttagatggtttattcattatctttcttctttattgatgtagaaatgtattgctgtaaacgtccctctaaggaccattttgctgtatttcataagttttcatatgttctgatttcatttttactcgttttaagacatttttaaaattaattttttttcattgacccattggttgtttaaggatatgttgttttatttgtatgtatttgcacaatttctgaagttcctcctgttgtttatttctagctttattccatatggtcaaaaaacacgtgatgtgatttgattttttgattagctaagacttgttttgtggtctaacatatctatcatggacaatattccatatgcaggtgaaaagacactgaattatgcaattgttggatgaaatgttatgtaaataactgttaaattcttttgatctagagtgcaatttaaatgtttctttgttgagattctctctcaatgatctgttcattgctgaaaatgggatgtcgaggtttcatactattattatacagttttttgtctctccttttagatctattaatatttgctttacatatttaggttctccaatgttgagtgcattatatatttacaattattgtattctcttgttgtactgacccctttattattatataatggccttgtttgtctgtgtttacattttttctacttgaagtctattttatttgatataaatataactacttctgcattcttctgatttccattgtcataaaatatatttttccatctgatcactttcaatttatgtgtgtttttacaggagatgggagtctcttgtagaaagaatatagttaggtagtgcttttaatccatttacccattctctgtcttcttactggataatttaatctatttacattcaaggtaattattcatagataaggacttgtactgccatatactcttttcttgtagtcttttagaatttttgtacctttttgtccctctgttgtcttcctttgtagttaagtgattttctctgtgtgtttttgtttcttgttcttttatttttagtgtatctaataaaaatgtttgctttttgtttactatgaagcatgcaaagaatattttatagtttcaataggtaattttgaatggataacaacttaattttgataataagaaatggagaagggcaatcaatctgctctttaactcaatcactcccccatattttgcatttttgatgtcttaatttacatcttttatatcacttatcccttaacaaattattgtagttgttattatttttgttttgtattttaaccttcttactaaaaacatgtaagtggtttatattcaattattactatactagagcatcctgaatttgtctgaatatttatttttacctgtggatttgtaccttccaattttttgtattacatattcgtgcccttttctttcagtttgaagattcttctttaacatttcttttaaggcaggtatggttacaatgaatttcttcatcttttgtttgtcttagaatgttttaacctctccttcatttctaaatgagagctgtgctggatactgtattcattgttgacagtttttttcttcagcacttgattctattatcctactctctcctggtccatattgtttctgctgagaagtctgctgccaggcacattggaattctcttatgtgttatatgcttcctttttcttagtgctttcaggacctactctttgtttttgacgtttgaaagtttaattataatatgtcttttggttgtcttattcagattaaatcaaattagtgagctttggccatcctaaacatcttaatccttctccaagtttaaaaagttgtctgttatttctctgaataagcttctaactctttttcattcttagtcacactttaacactgtagattttttttcttgatggtgtcccatggatctcgtaagttttctttgtttcttctcattttttttctcttttctactctgacagtgtattttcaaagagcctgtctttgagctcactgctgtttttcttctacttgatcagttctactcttgatgccctctagtgcatttttcagcttatttactgaactttccacctccaggatttccatttgatttcttcccattattttaagttctttgttgaatttctcataaatttccatattgtttctttgggctttgttgaagtgcacagattttttttttaaaaaaaacagctatttgaattttttgtctgccacatcattcatttgcatgtctttaggttcagttgctgacaccttgttttctccatttggtgaggcagtttttccaaggctattcttaatttttgtagatgtacatctctgtctacacattgatgaattaaatatttatttcaatcttctcagtctgggtttgtttttgactgtttctcagtgggcttgtttagaaattctgtgtgggtttccattatattccattttagcattaggaggtgcccaaagcaaaggttagacataagtcttgcaatggggcttcaccattgatgcaatgtaactggatgggcctgtgggtgatccacagaaagactgctgtctgtagggggagaacaagtcaggccatcaaatctggacagtctgtgtatcatgtttcccacagcgtggtgcccataaacaacctgcctggtataatgtttcctctggtaggaatggctagccactgctaagtttcatatagtaagtattgctaacccaatcccttctttatgtccctagcatgcctctggtggttcagctctgttgacactcatggtgctgcttgtgggctgatgcaggagtgagtctactgtgaaggcactcagtatggtggaaaaatattcaacttctgctcactttattcagtgtaagaactgtgagttcaggaggactttctgcatataataccattatggcctgggggaggagtatcgcagtcaaagagtactgtttctcttactgtccaagcatggttttactcctctttgcagtccaaaggggcttcatagactcactcacgtattcaggattccttagctcttgtaaagttaatttcatatgtggatagttgttcatatagatgtgtctgtagtggtatgattactagagagatctactccactaccttgctctgcccaaacccttcccctttccaacaagagtttgccacctcctagttttcttttttcttaaccaaactaagtttagccttttaatccttcaccctcttccacttctaatgccattgcttctttgtatgcttattgtattttccatgctatgtgactttcagctggttatttacagtatgtaagttttaatagcttgtaaaatggggataataatagcatccatttgatagggatgttaaagatattaaatgacactgtccatgttaaataacttcttgagatatattgagatgtttctgtacttccttgttctggccttcttgttgaaccagaggaatctattgccatgaaaagcaataaaactgtgatagtagaaattaaaagtgagtaggaacttatttaaaaatcatcattctccttttcaatgcaaaaataagaactagaaacttttaataaggcaatagtctggagaaataatttatggaagataacatggattttttaatcttaaagggttcttttacatattcaagggtcgaggttggctgccttgaatcctactaaaatttcaatgtaagttttagagagggaggaaagagtcaaaggaaaaattgcactggaaaaagttaaataagtaaggaagatattattcaagctattgcaatacgggagagaggccagacctagtctgaactcagctcctctgatacaaagggccgtggagtttttgaaagtgagggtaagggggcgatcataggccacctgtctttgctaactgtcttttctcaaaggaaaattaaactttcttttatctttatgatataaggtaatttttacaacttggagcaagattaggctcttactctctcatggagactgggaaataaggtattatctttctggaggattacatttgaaagggatggctcccagatccttgaaaaaggaaattttctgcttacaagttacacatgccacttctacctgcatttcagtggccaaacaggtcacatatctaaatctgaccctttcttcaataggacagaaatgtataatcttctaggagatagggtcactgcagtaggaagaccagataatgggagaatgataatataatctaccacaatgaccacagtgaaaacattagtaatcctcagggttaaccaagtcttcttggacacttaggttgattctaggctattgtcaatagtggaatagtaaaaaataaagagaatagcccatttattttttgcagagaagctagacaattcacagtaacttatggcctagacaattttgtttcttgatcaacacaaccctttatagatgcctgtggtccaaaaatgtggattcctaatcgtccccaaaataaagggatcctctacaaggcaacctgggagggagtttaggattgttctgaggcagtgaaagccattgagattcacatgtaagagggtagagaaagggaatccacatgttttgatccctccatgtgctggatataacttggtcttcattatattgcaccacctttggtgtcagagagaactggatttgaatcccagttccatcactcattatgatttgatggtgaatgtgtttttaactcatctgagactcagtttgctcatctataaaagatgggattgttatgagacttgcataaggtaagtgtttaaaaatctgggaataatccctgtaatttaaaagacagggttgtgataaggcttcaataaggtaagtgtgtaaaatctggacacaatgttactaattttgatggttttcaatatatagagaaggaggattatttttctctcatttaatttttagaacaagtttataaaattggcattattcatatttttgagataatcaaaggatcactaagtttaaataaatcaccatagtcacaaagcagttcacaatatattgaccggacaattgctagtgaaaagtagcaatgatgatcacattgaaaatcttgtgttaggtggtggttttctcttgcataagcctcttcatttgttgaaaccatagattctaagtttgctctatcaaagtgatcattagaaaaatataatatacttagtgtataaattttagaaaatttcctttttagtcctgttaatttgattgaatatgtgcattttgaattatgattataaatatgaatatgtatggcatatgaaatatgacttgacatcacagagtaaccttagatcatggcaatgtttttttctgaaagcacctgcagaaatgtatcttctttctagtttctaaaaaactcagaggccataggggaagaggggactttggctgtcagatagtgcatgaggtacattaggatatagtaattgcatcataattcatattcataattcacagtgaggaaacctgaaatttgcttccagctaccaataaatgaaaggtggggcggggtcgctggggggcgcggctttgtgagccagtgcctggactcacacgtcacaaatggaagggcagcgcgtggagggaactcaaggcctgattggtttttcctaagcaggacacgatcaggttggcagggcaaccggccttcagttggtggccttcagtgggtgccttaagttggtggcatttggttgcctttcctggggagaggcagcaggtgctcagctctgcagacgtaggggcaagcggaggcccaagctgcctcgagaagagcagaggtgccccatggggaccacgatgaccagttgcatgtgcaccaaagccagcccccggcagggccagcacaggggttctgcggggccgtcctgtggctctgatatctatgagtcgttggccagcaaaggcacaggcaccagcagaaaggagcagaaacgcccagaacatcctgtcccccaatgccagccccaagcagggccagcttagggtgcggtgggcagagccatcttgcagctctgagatccatgaggaggaggtgggagtagctccaggctccactgcgttggagctcgcacaatttgagcccaatttgattctggagccatgacttgcagcacattggcgaccagaagacccccaaaggtagggaggcgacagataccgcttggactcaggagctcctctggccgttgctgaaccaaggttcccccagagacatccacagcctggggctcctcccttcttcacctagttcctttcctaggcccaggccccaagcatgaggactggctctgcctggcgtctccatcccttggtctttctctgttgcatccagctggtttcttttctcctccctacccatatgcccagttatgggccctcttcttcttcctagaggctggtcaaaaactaagttttcaaagtccaaagtggatgctacagatttcgttgctttagaggaaatgtctgacagctcttgtatttaaacttaagtagctacactgggactcacagtttcatatcttaagttctagaccagagctatctaccctaaagcaacggtaaggggttagaggtactcttcttgattcgaataataaaaaatgatttttttttgtagggacaaggctcactgtgttgtccaagctggtctcaaacccctggcctcaagtgattcacccaccttggcctcccacactgctgggatgacaggcaagagccaccacacctggtcattggaggtgctcttgctttgtgtgtttgggctggtcttcaggcgcagctgtcagtaagatgctcctgcagtatagttctaagtctttctgcacagattcagtgggtcctgtgtttttttacatggaatagcccatttattttttgcgagaagctagataattcacagtaacctatggcctagaaaattttacttcttgatcaacacaactctttatagatgcttgtggtccaaaaatgcagattcctaatcatccccacgaataagggggccattgcaaggcaacctgggagggagtttaggattgctctgaggcagtgaaagctactgaaattcccacattagggggccaaaaagggaatccacatattttgatccctccatgttctgggtgtaacttggtcctcgttaaattgcaccatttttggcatcagagagaatcggatttgaatcccagttccatccctcattatgatttgatggtgaatgtgtttttaactcgtctgagcctcagtttgctgatctataaaatatgtgattgttacgaggcttccataacgtacatgtgtaaaaaccgtggcaaaatgctgtaatttaaaagagagggttgttaggagacttctatcaggtaagtatataaaaacctggacacaatgcctataattttgtaagtgttcaatatatggagtaggaggattatttttctttcatttaatttttagagcaactttataaaattggtgatactcatatatttgagataatcaaaccaaggatcagaaagactaaacaaatcaccatagtcacaaagcagttcacaatacatttactggataatttctagttaaaagtagcaatgatgatcacattgaaaattttgtattatctggttgttttctcttacataagcttcttggaatttagtaagataagttccagctcaaaaagcagatccgtagaatattttattccagagattgtagtgggggccaaagtattgcatgtgttttgttgggaacaaggtgtaggctgagaatctaagcaaacttcagttggtggttttcagttggtgggcagtggcagaaggaggaggagctccgtctgtgctctctcttccgccagtcacagccctcaggcttgttgcattcaagcccttctaagttaaaccagacaggtcgacaggtttatttatcatttagcagacaagtcagctcagggtaggcgggtgaggtggggtgtgggctgctagtacagtgctgccctttgacccagggctgcctgtgcccatggggctattccatacattatatatatataatattttatatatatgtatataagcctgttggtttgttaaaaccatggattctaagttgctctatcaacgtgatcattagaaaaatgtgatgtacttagtgtgtaaattttagaacatttcttctgttagtcttgttaatactcaattcttttttaaaacacctagcccaaatctccataggttttaatcgaattatattataatttggattttctggtctgcctatcttccaaataataaagttcttaatattaattttgtattgctgccataacaaattactgcaactttgtggcttaaatcaaagacttacgaccctatagttctttagggcaaacctctgactgtggtcttactgggcttaagtcaaggtgttgtcagggctgtattgctttctggaggctctagagagaatccatttccttttccaacttttagatgttgtccctattccttggatcatgggaccatccttccatcttaaaagccagtaatgtgggatgtctgtggccattgttctgtagccatatcaccttctgactgtagctaggaaagattctctgattttatagacacatgcaattagattgacccccaagataatcaaggataatccccctaactcaagagttaatcacatctccaaagtcccttttgccccatgtaaagtaatatggtcacagattccagggactagaacatctttatggggtcattattttgactgtcacaaaggcaaagtcttggacttatgcatatctagattttctttgcttaatttctgagcctagaacacattagactctaaataaatgtgaatgagtgataaatattatatttacagattgctgccacattgcaattctgtcctcccactggtggtggaatcctatgtactttttaccatctccattttgcattcagactgaacatggctgtgttactcctttcacctgggtgatttcaaaccatctctctatttctatttgtagagatcttatctatcaagcccttctcaaatgccacttcaaaaaacattttctaatccccaattgtcttagtcaatttatgctcttacaacaaaataacacagactaggcaatttatgaaaaccagacatttatctgtcatagttctggagactaggaagtccaagatcaaggcattggcaggtctgatgtctggtaagggctgttctctccgtccaagatggtgttttgatgctgcatcttccagagaaagggaacactgtgtcctcacatggtggaaggtgggagggcaagagggatgaactccctccatggagccctttcatgagggctcctaaacccattcctgaggtaggagtcctgatggcctaatcacttcctgtaggatccacctcaacattatcacattgtcaacgctgaatctcggaggaggcacagtgaaaccacagcaccaatcaagtatgatctttctctcctcagaaaccccctcatatgtttagacctcccatgcacttttatacattttgtctcatggtttcttcctgtacaaataaggtgctataaatggatagctatagttttgggtttcatttcaacaaaacacccttcctagttttttgaaccccaagcgaaatatgaggacaggccccaccttccattacaaaagctgaaaggagtgcatgatcctttttccagtttcttggccactcacgtgtgggcacatatctaggcccagccaactgatgtctctttattagaacttggaacccgatgaaatgatgcaaaagacctgaaagaatcagaggtgattctgagaaattgagcagagatgcaggtccagaaatgtggtagcaagtgcctaggttcagcagagcccagctacatggtgacaagtgtcaaatggcaacatcctagtggtggcatcccgagatctgcttccgtcgaatgaacttggctgtgctgagtttccctcagttcttaccttgcttctccagcatcttcaatgattttgtgaactattcaatgtcctttcatcgaattcctattttgcttaagttgtctagaatttgttattttcagtgaaaaatataaaccaattatcccctcacattaaaacacactccactgaggcatctcctgtgatctcactggagaaaagtgtggacgttatttgtaatttgactcagaatgataggattagtttggtactagtaacaatggagataagtaactaactttttgtgaaacttcttcctggggtgaaacaaaatctattgtggaaactctttccaatcatctctggaaatttcttaagtgacctagtatgtaataataatttaccatgatacttgataaaatagttttgtgtgttcagaataatttctttcttctttacctttgaaaataatgcatcgatagttaattttctcctaaattgtctgtttttatttccataaaaggtatttattgaatgtctccttacttttaatataactaggcattgtgtgattaaagcaaaataaatatgttcttgtttctggaattactaaagctttgaaaatggacttatcgacctcaaaccaatgggacatattcccatgtggcctgctcccctgttaggtttcccagggtaagtggtgattccttttctgtctttttaaaaattttagaaatgcagcttctgctgtgggacactaggcggagtacttcagagcagggtttgtgggagtacaaagctaacttctgctgcttttgcttgatgcttctgcagcttccttgactactgtggatgataagtaactattttcttcctcttctttcttttttccccacactctttggagtgaactggaaacatttaggaagtttttttttttttttctttttttttttttttattatactctaagttttagggtacatgtgcacattgtgcaggttagttacatatgtatacatgtgccatgctggtgcgctgtacccactaatgtgtcatctagcattaggtatatctcccaatgctatccctcccccctcccccgaccccaccacagtccccagagtgtgatattccccttcctgtgtccatgtgatctcattgttcaattcccacctatgagtgagaatatgcggtgtttggttttttgttcttgtgatagtttactgagaatgatggtttccaatttcatccatgtccctacaaaggatatgaactcatcattttttatggctgcatagtattccatggtgtatatgtgccacattttcttaatccagtctatcattgttggacatttgggttggttccaagtctttgctattgtgaatagtgccgcaataaacatacgtgtgcatgtgtctttatagcagcatgatttaaagatgttctttgaaaccaacgagaacaaagacaccacataccagaatctctgggacgcattcaaagcagtgtgtagagggaaatttatagcactaaatgcccacaagagaaagcaggaaagatccaaaattgacaccctaacatcacaattaaaagaactagaaaagcaagagcaaacacattcaaaagctagcagaaggcaagaaataactaaaatcagagcagaactgaaggaaatagagacacaagaaacccttcaaaaaatcaatgaatccaggagctggttttttgaaaggatcaacaaaattgatagaccgctagcaagactaataaagaaaaaaagagagaagaatcaaatagacacaataaaaaatgataaaggggatatcaccaccgatcccacagaaatacaaactaccatcagagaatactacaaacacctctatgcaaataaactagaaaatctagaagaatggatacattcctcgacacatacactctcccaagactaaaccaggaagaagttgaatctctgaatagaccaataacaggctctgaaattgtggcaataatcaatagtttaccaaccaaaaagagtccaggaccagatggattcacagccgaattctaccagaggtacaaggaggaactggtaccattccttctgaaactattccaatcaatagaaaaagagggaatcctccctaactcattttatgaggaagtttgttgatcaacatatattgtgtttcgaaaatccggctaagataatatggtaggactcctttggttataaataatagaattcaaactcaaactggtctaagcaaaaaatatatattaatttgtggactcgtataatggaaaaatccagggtgtagcttcagaatgtctgaacgtagggactcaggacttggctcctctcagcttccttgctttttcttccccattgattttattctcagacaagttttccctttgtgctgcaatgtggccatcatcactcctccagtttacatttccttagttccacagtcccaggataaaacaaaaacagaaacccttctaatagtttcaataagagactagagattgactttgggtgtgaggcttggatttcatgtccatttctagtttcatctgtgccaggattagaagtatgttcattggccaggcctgtgtcatgagcacctacagggtttccactgtccacacagtgcctttgcaagtattagaaaatggctcccctttctccagttagatgcaaccctgtatcagggcatgtggcttggagaagagcatgcaggctggatttcaacccccctttctcccttagctgggtttcttccttgagtgaacaacatacttgttagtagctgtcctgtgcttattcctgaaactgggggtgaaatcagccaccacgccaaaactgaaggatagaaggtggcttcatctagggtatcagataatggctaataacaaagggaggggacagtgggtgctgtgtgggcaaaaggagcaagaaataatcctaacctgtgtagacttcacctcagaagccatatacaaccttcttcaatggaaatatttaacacttcaggagtgccaagaaggctataaggagcgtaactcttaaggacttaagttagggcattctagaatgtatgctttacggatttaccttataaatatataactgactaatacacacagaaaatatattgcagagtaacatagatgacagaacttgaaatacatgacattctaccgcagtctatcattattttctaacttatcaaaagactcagaggatcttttttttcgtattgatacatttctaaccagagccctatttacttgtgtcttgaaaaacagagtatttgcaaatatgtctgaagagggaagagaaagaaaatgattccaagaaagctgataacattaagacatctgtttatagaagatgtaaatttgcaaccacaaattaaaagcttataggagctacacagaatgtgaagaaaaataaatgaaaccaaaccactacaagaaataaccaaactaaggagacagcaagagaggaaaaaaaaagaactgcaaaacatatgaaaagcaattaaccaaacgcaagttactccttacccatcaacaatgactttaaatgtgaaaggattaaactatctaattaaaagacatagagtggcacagtggataaaagatactcatcagtacccatttataagggaatcactttagatataaagatacatagaggctcaaagtgaagggatgggaaaagatactctacgcaaatggtaaacaaaaaagagcaagggtatctatatttagatgagaaaaaatagacttgaaatcaaaaactgtcactagagactaggaaggtcattatataatgataaaagttcacttcaatgggaagattgaaaatatatatccacccaacattagaacacctaaatatataaagttaatatcaacaaagctaaggggagaaatcagtaacactaaaataatagtagccaacttcaacaccccaaattcaataatggatagaacatctaggcaggaagaaaaaatgaggaaacagctgacttgaacaacacagtagattaaacactgacagatacacaactttccatccaacagcagcagaatatacattcttctcaagtgcacacagaatcttctctgagatagatcaaatcttaggtcacaaggcatactacaaatataagaagtttgatataactccaagtatcttctcattccacaatggcataaaattagaagtcaataacaaagaaaacagaaacatttacaaaaatgcagaaactaaacaacgcatgcttgaacaaccattgggtaaaagaagaaatcaaaagggaattttaaaaatatcttgagacaaacaaaaatgaacatacaactcaacaaaacttaggatgcagcaaaagaagtgctaagagggaaatgttacagtgataaatacctacattaaaaaataagaaagaggtaactcgaacaacctaactttaaaaataaacaattagaaaaagagaaactaactaaacccgaagttagcataatgaagtaaataataaagattagaatataaataaaataactataaaatagaaaacaatagaaaaatcaacaaagctagagttgaatttttggaaatacaaacaaaaataacaaacccttagctacactaagaaaaaaagagaaactcaagtaaatataatcagaaatgaaaatggagacattataggaaatgtacaggcatacaaatgattataaaggacaattaagtgattatatgccaataaattggataacctagaagaaatggatcaattcttagaaagatgcaatctactaaaatggaacaaaaaagaaatagaacagaccaaaagcaagcaaagagatctaatcagtaatcaaaaatttcccaacaaagaaaagcccaggtgcagatgctttcatgggcaacatctaccaaacattcaaagaagaactaacaccaaaacttcttaaacccttcagaaaaaatagaagagagaatactctcaaactcatttcatgaggccaatgttaccatgacttaaaagctagacgaagacaacacaagaaaaaataattacagaccagtatccttaacgaatatagatgcaaaatttctcaataaaatactaactagcaaactgaattcaaaagcacattgaaaaggtcatacaccatgaccaattgtaatttatctatgtgatacaaggatgtttcaaagtgtaaaaattaataatgtgatataccacattaacagaatgaaagataaaaataacattccaatggatgcagaaaacacatttgacaaaactcaatatattttcatgataaaactctcaacaaaataagtatacaagaaacttacctcaacactataaaggctgtatatgaaaaacctatatctaatattataatcactggggaaaaactgaaagctttttcttaatatctggaacaagacaaggatgtctactctcatcactcctattcaacatagtagtggaaatcctagccagagcaatcaggcaagagaaataaaaggcatcaaaattgaaaggaaagatgtagttacctctgttaacagaaaacatgattattatacattgaaaactctaaagactccacagaaaatggttacaaataatacagtcagtctttcatatctgctggggatttgtttcaggaccccctcagataacaaaatctgtgatgatcaactccctcacataaaatggtgtacagttggccctatgtatccatgggttcacatctgtggattcaaaccaccacagatggaaaatgcgtacaagttatgttcatagttcattgagttcatggttgcagaacccatggatatgaaggactgactatataataaatttactaaagttgtaggatacacaatcgacatacaaaaatcattgctatttctaaacactaacaatgaattgtctgaaagggaaatttaaaaaacagtatcaaataaactactttggaactaactaaccaaagaagtgaaagacttaaacactacaaattataaaagattgatggcagaaatttaaaccaaagtaaattgaaagacaacccatggattgtaagagttagtattgtattattaaagtgtccatattactcaaagcaatctcacatttaatgtaatccatatcaaaattccaatggtatctctcacagaaatagaaaaaaaatcctaaaattcatatagaatcacaaaaatccctgagtggcagaagcaattttgagcaagaacaaagctacaggtatcacaattcctgacttcaaattaaattacaaagctgtagaaagaaaaaacactgtggtaatggcataaaaacagacacataaaccagtgaaacaaaatagagaacgtaggcataatccacacatttgcagtaattgatcaccctggaaggtgacaaggaggcactaaggggaggatatgttgttgaccaaatggtgttaggaaagctggatgtctacatgtaaaagaatgaaataggatccctagctcacgccgtatgtaaaaattaactcaaaatggattaaacgtttaaatgtaatcactgaaaccataaaactcctggaagaagacaagagaaaacattcttgacattggtcttggcaataatttgtttagatatgatgccaaaagcacaggcaacaaaggcaaaatagataaatgaattacatcgaactaaaaagcttctgcacagtaaagaaaacaaataatgaaatgataacgcaacctatgaaatggggaaaatgttttaaaccgtatctcttatgaggagttcaaaaaataagaaagacatatacacatcaattccaaaattatgaataacctaattttattttaaggcaaagaaactaaataaatacatctcaaaagaagaaactcaaatggctaacaggtatatgaaaatgtgctcaacatgtctaaacttcagagtaatgcaaatcaaaaccacaatgagatatcatgtcacacctgttaaaatggctattatcaaaaagagaagagataagtgttggtaagaatgtggagaaaagaaaaccattatacactattgacgggaatgcaaattagtaaaacacagaaaacagtattgaggttcctccaaagaaaattgaaaatagcactggcctggtgtggtgtctcacacctgtaatcccaggatttggggaagtcaaggcaggaggccaggagctccagaccagcttgggtaacatagcaagaccccatctctgaaaaaaatttaaaattaaccagacatggtgttgtacacctgtagtcccagctactcaggaggctgaggtaggaggatcgcttgagcccaggagttcaaggctgcagtgagctatgatcttgccactggactttaccttgaatgacagagtgagacccggtttcaaaaataaaaaaaaaagaactaccacataatccaacaatttcacttttggatatatgtccagggaaattgacagaagagtcttagagaggtgtctgtcatcccctgttcattgcagcatgacacacaatgaccaaaatatgaaaataacctaagtgtcctttggcagaggaacagatgaatgggtaaagaaaatgtgacgtgtatacataaaatgaaatattatacaaccttgaaaaagaaggaaatccttctatttgtgaaaacatggatggagctggaagatattgcgccaagcaaaaatgcaagacacagagacaaatacttcatgatctcacttacatgaggaatctacaacagtcaaattcataaaaacagagaataggacagtggttgccaggggctcagggaggggaaatggggtgatgttaattaaattgtgcaatgttcaagttataataatttctggagatataatgtacaacatggaacaacactgtatcatattcttgtgttctgctaaaggactagaacataaattaattactgtcaacacacacacaatggtaaatatgtagagataatatgctaatttgctcgattgtggtgatcatttcgaaaagtatagaaatatcaaaacattaagttaccttaaatttatacaatttgtatatgtcatgttatcatcataaagctgttaagaaagatttagtgaatcatgtcaaccacctgggaactttctcatgacagggagggctggagtaggaaaatggaatttttcaacaaggatagggtgagggacatgggaaatgattgatcaagtatttaagaaatgacctgggtggaagctacatcaaagggtaggagctttagcgcatcagtcctcaaactttttggttccaggaacactacatttttaaaagttattgaggaccccaaagagcttttatttatttggattatatctatctatatttatcatattaaacattaaaactgagaaattaaaacaaataaaataatatgtttacataaatcacatttttatttaaaattatcatttttaagcagtaaagttggtgagaacagtgacattgttttatatttttaggtatgtctttaaagtctggtttaatagaagaaaacttggttctcctttctgcttctatgtttaatttcttgtgacatcccatgtcaggtagcctctgggaaactccaattatacttgtgagagaatgaaagtggaaaagttaaacaaaacctgtgtctttttatgaaaagacttttgaccttgcagagcccctggaagagagtcagggacttctcagggttctctggctcatgtgttcacggagtagagggtaagtccgcaagagaaagcagtgattggctgtgggaggtcttgctgagaggtgatagagaagaggttgaatgtgtagaaagtatggtcgttattttcatttcttttccctttcctttggcctcttgttgctgggatttcctctttagatgatcgtatcataaattagaaatagcattaatgaacattcttgatactgcctaatgaaagtttttgttttgtcttcctgagtcttgatacatttcaagaagtcttctatctcatttatttttcccacccaaatttggaatttaggaagagtcgatatagctatatttagatgatttatctccctgacgacattttgggatcatttataaatctctataaacaatgctctgatgttcctttattttgtttagagactgggtcttgccgtgttgtctggagtggagtggctcgagcgtagctcacaatacacaatacaatcaaactcctgggctcaaagtgatccttccactcagcctccacggtagctaggtctgcaggtgtgtgccagcacgcctagcttttgattactattattatttttgtagaaatgagggtttcattatgctgcccaggctggtcttccaactcttggcctcaagcgatcctcctgccttccgccgtctgaggagctgagattacaggtgtaagccaccatgctggttctgatgtcatttaaatacaaacatgatactgtattccttgtagaaagtgctacataaatataattttttttgaaatagggtcttgctgtgtcacccaggctggaatgcagtggtatgatcacactcactgcagccttgacctgctgggcttaagtgatcctcccacctcagccttccaagtagctgggacctgaggtatgagccacaaagcccagagaatttttcaatttttggtaaagatcggcgtgtcactgtgttgcccaggctggtcttgaactcttgggctcaagttaccctccgcccaggtctcccaaagtgctgggattacaggcctgaaccactgcaccgggtcctaaaaatttgttcactttatttgtttgtgcacaaggtgctgctgtttcccttctaataacatgagacagctcactcaagaacatcaagaacacgacattctctaaaaaaaatcacagtagttccttttccataactattaagttttcaagatgttatcaggtttatctcatagaaagaatgtgtaaaatttttcatgtagaaacataatcttttagcaatgagttagttaaaaaaattggcattgtcagagtgacgatttccttttccctataattttatttattataattatatttttagtgatatcaattgctttataaaaactcattgcattatatacccaatgactgtgaaatcatctactttgaagcactgtgaagtcatcaatcagcgtactgggtctaacacagttccttccattttaagaaagctatttacactccaatttgcaagttggattttacaaaaattaaaacatttagaaaatgtactaactacgattgttttaaaaagtagtggttttttatggtaaggaaataaattgaagctctgttttggaaagtgcagaaaacaaatcagcatctttataaatagattttactgctggtttagaaattaccttatgtgctttatagatgatggaaaatgaaatcagctgcagttagcaatgtgcatgcatcgtacttgctgtgtcactttcagaaagattatggaatattggcaggtcaggattctcaaaatgataagttctaagaagaggctaaatgaaaaagaattttaaaagcaaggctaattgtttaatatatacatggacgagttatggggaaatcctggactgggagctagcagatctatgttctgacttttactaagtcattggcttctacagcaggccaagcaaacataactgccaaggctgcctgggagttgggttgattggcaattggcacagggagagaggacaattgccagaataatggccaaatagtcagggtttcatgttgagtgaagcaggacatgcatttgtatcccaagggcaaaactgacgctagaatctgggcctcctggctgaatctgagtccacagtctgatgagtaggatgaagtagtctcagaaatccaagccagccagaacccatgaggtgtgctctgcagatattggctggcgagctgcattaagatgtttcattacattgagcaaacattccttgattggttaggttagcatcccacaagagcagagacaaattcttcagaatttgtccatgaagctatagtcccagagcttatatttcaagggaggagggaggaaacaacatctcaggatggtaggtgattacaactaaaccgaattctgaaaataaaaggaaccctatgtctttgtctgctcaggctgcttctacaaacaactgtagactgcgtggtttaaacagcacatacttgtttctcacagttgtgggaaattcaaagattaaaatctgggccagcagagccagtgtcttgtgaaggccctcttactggtttgcaggtgttcttgttgtatcttcacatggctgagtgaagaaggctctagtcttctactcttcttattaggatgctaaccccattgtgggaactccatcctcatcaaaaccaaattacttcccaaaggtcctccttctaatgccattctattgttagagtttcaacatgtgcatttgttgatgcaaacatgcagtgcacagcatcttatctaatcaagtcagttgtcccttgaataaaattctagctcctataacaagacttcaaattatgacttggttgttgccaaaactatctatctggatttgctagaaatcaaacatacttgaatatttcctctaaaggttttctcattcctaccctattgtgtatatttacagaattcttaaataattacatactcaaggcttctattagctctgacgagagcttctattagctttgactattgcaagcagctttatagcactgtaggtaaaaacatgtgctttgaaatcatacaataaatttattgaatgctaagcactttataaccactatttaatgttatcatcttaataaccttcattataccctcattaacaccctatttgttggctacttatattattctgattttgcaaatctaaatttgagaggctttcccaatgtcacataagttaataagtggcatagctcgggtttgaattaaagtctacctgattccaagatctatttaccattgttctacaatatgtagtttttaggtccctgagaatgctaacagcctttcttttgaaatctgcattatttctggatagcagctttattaatacataaccatatttcaggcaacaaaattctttgaaatctttcatttccattgggatataaggatcagttctgtggcattgtcagccagaaaacatcatttggagactatcttgtacaagaagtagaagacacagctgggggcctgcagaggacagaaagctcacagcttctgtcaatacccctttcacttcctcctcaaggagattgacctctgtggctggtcaagcttaaggatcttttatggaccacagctaatggtgaaatcttcctaactctaggtgaagattaatgggcaagttggagagttaaggtagcttatggctgctccttttagaaaaagtctgttcattgctctcttatttgtgaaacccctctgttcccccaaatgcttggtaagacattcctgaagaccaatcctgtgtcagtagacttcatatccactctcttctaccaatcacacaactacagacaaataagaaaaataaagcaaagctcagacacactcccctggcacggaggccactctctggctggctgcttttctctaccatgctgcatcctgggcatttggctctttcttagatcaaacagagacatgggtttgggattaaagagaagtaggtgaaaggggtctctggcctgttttggcattagaccaagttaacaacagaattctggcttaagctcagttctgtagagctttctctgtgtttggggaaaatctccgatagtaatgaaaaggtattttactgtgcttcgttttctgtacatgtatctctttcttagatatattgtgaggagattcgttccctggacaaatgccatcttaatcaccttcattattaccaattttattttatttgcagaattaaaatttaaatagacattcaggaaacaagtctggtgagagaattatgttatgaggttaatctttcagcatctgccttagggacattgattattttcccccttgtttttcaccaagctccaggcttgcaaaagaattgtgatgtgatctgaggcaaacttactgattggctagtggtaagtttaaccataaccggtagaaccgctgggaaccattgcttgtcaccggccagaaatccactgtttggaggtgtgcgctgggaaggctgttcatacttattgatacatgctttgttcttggcactatgttaagtactggacacatgcaacaatttggaatatcgttacattcaaccctcacaatagtctgatgtatatcttattagtcccgtattagagacgagtaaacaagattagaggaagagaagtacacagctggaaccacacaggctgcactgggacaggaagcagttccgtctcaccctggaccaccatttctatgctgtgtctccactagaggatcctttctttggttcttctgagtcattagtcatcaataatttatcttcaaactgtaggtttcacaggaggagatgccacttgaaggttcatggcttaaaatggagatggaatgtggaatatggtgggaagcaccgggaggggtttattgataaatttcaagtactttgtggggctctgaaagactgtcttcaaattctttgtcctactacctctttcatattcaaatgtcatgtgggtatatcttttgggttaaattaaggaaaatctccatgaaaagtaaaaaacaaacaaaaaaaccccaaaagaatagaaagaggtactatgaaaaatcaactcagatttctcagagttttattaactcaaagaagccttggtccagttggaagaagacagaattgattttgacaatctccagcaaacgctttagtgttcaatgcactctagaccatgagtataaagaagttcacttaataggttcaccaaattagttagtttgtgtagttcaaagggaaacagacacacaggactgtgaggttttgacagctgcgaaaggcaagtctgggtccagtgagcccaggcaggccatgaaggggcagggcaggagaaggacggtgctgggaggctagggaactggccacctctgtgctggctgaagatcacaaaaatctacacagctttctgcaaatgctgccagtgcctgatggaattaaacagagctctgagaaagacagcactgtggccgaggatgggtcctgagctgcctacagtcatcaatatcttggccagtgactatgcactcaggggcaatttggctagctttcttgatccacaccagaaaactcgcttttgaagtggtttggaaagctccaaaagggaagtgcttcatgctattggtattgctgccaaaaagaaaagattctgcttttcatcagctgctgattttcgctctctgtatttctctagcatctgttgctggtggccctggttatgctaacaagtagatagtgtagctgcagcagcagaacagaaaagactctcctggattctcagttccaggctggcctgggaacaggcttagggatgtttcaatgtttgaatgcaggtgagctggagatctgtggcaattcttttgacatgaggctgggcattctttatagcttccccagacacaggaattggcagggcttgaaaaagaatcactggcaggaggttcattttctttattgctacctccccagccataaaattaaaagctttttacctaaataacgttagccatctcgtgggagtaggagatcatttccttcagagtctttcccgattggagtctagtcctaggatggtttgaacggtccatttgaatttgaggagctttctaattgatgcttctcatcccctctccgaccagtcttatttggtgacatctgcctttccccttcctccctacaaaacctcagagtcttgaaacaaaaatcttagtattgtaaacttcatcatgctaatttcatcaattcaaacgaaccttcccttgtttgagtttcctccaactgtgtgacttagggctgttgaactctttcaaatacacaggaaaatggaaatctcttttggtgtctagtgattgtataataaaacattttcagatgctaatcacatgctttgtgctttgttaatgaatgaaattctaaggatattcctatttgaaaggtttaaaaatataatacctgtcattatatctaattctgtctacatttctggtgtgaaatgagaagtcaggagccctgccatctacacagtgcatggttctaccagctatttctgtgtcacttcaagcaaatcacttcttttctgtcttttctttctttttacgtaaaatgtggataactgtctcactgaattaatagagtgactgtattatgtacaacaaaatttattgaaaagcataaagctctataattaggtagaatgttacctgtgatttataagctttttaaatcctggggcagtggaggaagtattcctcttactgtaaaaggacatccctctaataatctcccttcttttcctgacttttcagggattctgttcattgcttttccatttgtcatctgcatcgtcaatctctctccttcttgatgcattcggtcagcatttaaatataaatttttcatttaaaaaatcttctatcttggaggaaccttaaatttgactctgtgtgtctttctagctatcaagccatctcctcctttcttggcaaatttttctcaaggattttccacatttactatctccttttgctcattttcctttcactctttattcaggtcagtttggctttcactttcatcaagcctatgaaactgcttgtgctaaggtcaccatataagagtgctaggggcttccatcacaagctgccacagattgagtggtttatcttctcacagctctgaagactggaaatccaggatggaatgtcagcaggtttgccttcttctgagaactgctgccttgcagatgcctctcttcctgctgtgtcctcagtctgtgttgcctgtgtctcaaactctttttacatggacacctgccatattggtttagggtccacccatatggcttcatttgacctcacttacttctttgaatgccttctctaaatcagtccctctgaggcagtggggatcagctcttcaacataggaatctggggggacacaattcagcacccccagaattggtgattcctaaacatcatgaacactattcctctttctctctttctttccctttctttctttctttctttctttcttctctctctttctctctctctttctttctttcctcttcctttctcccttccttccttccttccctccctttcctttcctttcctcgctctcccttcattctttccttccctttcctttcctttcccttcctttcctttcctcactctcccttccttctttcctttcctttcctcgctcttccttccttctttccttccttcattctctctctttctcccttccttccttctatttatttacttttgtttatataaaatttatgggatacatgtgcaattttgttccatgcatagtggtcagttcaaagctattagggtatccatcacacaagtaacatatattgtacatattatgtaatatataagtccaatggggtctcaggaacgttcagtagggtagacccctgacctcttcctctagcttgaactattttcttatcagcttctccctctttgcccaaactttaaatgttgaagttcctaaaacctgggtcctcttctgttcttattccatactaggcttgtccaacccatggtctgtgggccatgtgtggcccaggacagctttgaatgcagcccaacacaaatttgtaaacattcttcatgcattataagatattttatgattttttttagctcatcagctattgttaatatcagtatattttatgtgtggcccaagacaattcttcttattcgaatgcagccagggaagccaaaagattggacacagactgcctacacagacactagacaaggttttattaattactatggctttagataccatttatatgcatatgactcctacagacctctcctcccaagctccaaaacattatgtgcacctgccatcttgaaatctcccctgggattttcacaggcattcctaaaatcagatttcaaaactcttgagttctgcccccacatctatgccacttcctcaatcatttctcttttgttagtttatttctttttcagccttaccattcttcataaaaattatctccatttacccatttgcttcttccagaaagcatcatcatccttgatgctttcttcttcctgcaacaacccctaccatcacaacttgcaaccaagtactgttatttcaccttcaaaatatgtgctaaaattatccgcttctgtcatctgcatctttcacctggcgtgcaaacatatactcctctttccaactttttgcctctccaataccttctctatggcacacccagagaggtttttcaaaaatatcaattagatcatgtctctccttcgtttaaaaatctttaatgattttctatccacgaaataattctgctagtctgcaagctctaaagatgcaaggactaggtttgccttatttatttctgtttatgcagagcctagccttgcatttagtacgaatttaacacattgacctagatcttgtccaccttctcagcctcacctctcatggaagcactcatagacctcagtccagttacacttttctcagatccctgagctggcctggtacagggctgcctcggccgtgatgtgttcactcctgatttgttggctggtatctgtttatattcttgctactgtaaatgatgtccaaggcagtcacataggcatccctgggagcttgctagagctcaggcaccaccctagattcaatgaatcagaatctgcatgttgacaaagtccccaggtggttcatatgcacattcaagtttacggtgctttgctctggatcccagcctgagtgttacttctttaaagagacctttcccaactggccaaatcttattaagtcatgtgatggattcactcacatggtctgtgatacagaagggaaaaggagttgcggcctattgatcagaatatgctcactttagagttttacctaagggtgatcctatcaaaagttctggattttgtagagaagcatacaaagtatgtgaatagtttgatttgagcaaattgaaaattgccagttttctttgctttaaccaatgtttgctttccctctgaaaatcccttgttacaggtccttagttttagtttgccacgttatgacaagatgggaatagtgcacagcagtgatcctcagttggtttgggttttcaatacataattgatccatggttgtgacatgcattgtagcatgtccaactagaatacctattctttcaattactttcattactttcaatgccaaaacaacaattacttttgcactaacctgatagctttgctacaagtcagtcgttcagttttctttatttgttgtcgtttgtttttatttttgcaaacactttagatactacatagtggatggattagtttgtggttccttgtatcttctgtgtattctgttgaagctcaataatcacattactgcggacctccaaaattttacaaaggactgcatagtgagtattcagtcgataaactaaaccacagcttattactgtgagaagaaagaaagcacaccaattaaaagtaaacactgtttaaacttatctcaatgaatttctaaagagtcatacatttattatattctctatttgtaaaatattttgttgtgtgtattgccaagtatttcaggattttatgggtataatgtattccactaatttaaaaggaaaccttgtagttattcaacaagcaaactaaaagtgttggcagagatgtaatttcgaaaagagtgtttcaaaacttctctttcaaaaaaaagttcaactctgtgagttgagtacacacatcacaaagtagttactgagaattcttctgtctactttttatgggaagatattccctttttcaccataggcctcgaagcgctccaagtttccacttacagattctagaaaaagagagtttcaaaactgctgtatggaacggaaagttcaactctgtgagttgaatgcaaacttcataaagaagtttctgagaatgcttctgtctagtttttatgtgaagatattcccgtttccaatcaaagcctcaaagctatcaaaataaccacttgcagattctacaaaaagagtgtttcaaaagtgctgtatcaaaacaaaggttcaactctatgagttgactacacacatcacaaagaagtttctgagaatgcttctgtctagtttttaggtgaggatatttcctttttcaccctaggcctcaaagcgctccaaaggtccacttccagatactacaaaaagagtgtttcaaaactgctgtatgaaagggaatgttcaactctgtgaattgaatgcaagcatcacaaagaagtttctgagaatgcttctttctggtttttatgggaagatattcccgtttccaatgaaatcctcaaagctatccaaatatgcacttgcagacactacaaaaagagggtttcaaatctgatctatgagaagaaaagttcaaatctgtgagttgagtacacacataaccaagaagtttcagagaatgcttctgtctggtttttatgtgaagatatttcctttttcaccctaggcctcaaagtgctccaactgtccacttccagatactacaaaaagagtgtttcaaaactgctctaggaaaagaaatgttcaattctgtgagttgaatgcaagcatcaccaacaagtttctgaggatgcttctgtctagtgtttatgtgaagatacactcgtttccagggaaggcctcaaagctgtccagatatccacttgcaaattctacaaaaagagggcttccaatctgctctatcaaaagaaagtttcaactctgtgagttgaatgcacacattacaaagaactttctgagaatgcttctgtctacttttatgtgaagatattccgtttccgatgaattcctcactgctgtccttatatccgcttgcaaattctacaagaagagtgtttccaaactgctgtatcaaaggaaaggtttaactctgtgagttgagtacacaaatcagaaagtcgtttctgagaatgcttctgtcaactttttatgggaagatatccctttttcaccctaagtctcaaatcactccaaatgtccacttgcagattctacaaaaagaatgtctcaaaactgctgtgtgaaaaggaaggtacaactctgtgagttgaatgcgaacttcataaagaactttctgagaatgcttctgtctagttcttatgtgtagatattcccgtttccaatgaaagcctcaaagctatccaaatatccacttgaagattctaacaaaaagagtgtttcaaaactgctgcatcaaaaccacgtttcaaatccgtgagttgactacacatatcacaaagcagtttctgagaatgcttctgtcgaatttttaggtgaagatattgcctttttcaccataggcctcgcatcgctccaaacgtccacttccagataccacaaaaagattgtttcagaactgctctatcaaaagagagctccaactctgggagttgaatgcacacatcacaacgaagtttctgagaatgcttctgtctagttttatgtgaagatattcccgtttccaatgaaggcctcaaagcaggctaaatacccatttgcagattctacaaaaagagtgtttcaaaacttctctttcaaaagaaaagttcaactctgtgagttgagtacacacatcacaaagtagttactgagaattcttctgtctactttttatgggaagatattcccttttccaccataggcctagaagcgctccaagtttccacttacagattctagaaaaagagagtttcaaaactgctgtatggaacggaaacttcaactctgtgagttgaatgcaaacttcataaagaagtttctgagaatgcttctgtctagtttttctgtgaagatattcccgtttcctatcaaagcctcaaagctatccaaataaccacttgcagattctacaaaaagagtgtttcaaaagtgctgtatcaaaagaaaggttcaactctgtgagttgactacacacatcacaaagaagtttctgagaatgcttctgtctagtttttaggtgaggatatttcctttttcaccctaggcctcaaagcgctccaaaggtccacttccagatactacaaaaagagtgtttgaaaactgctgtatgaaagggaatgttcaactcagtgagttgaatgcaagcatcacaaagaagtttatgagaatgcttctttctagtttttatgggaagatattcccgtttccaatgaaatcctcaaagctatccaaatatgcactgcagactctacaaaaannnnnnnnnnnnnnnnnnnnnnnnnnnnnnnnnnnnnnnnnnnnnnnnnnnnnnnnnnnnnnnnnnnnnnnnnnnnnnnnnnnnnnnnnnnnnnnnnnnntaccttttcattactatcggagattttccccaaacacagagaaagctctacagaactgagcttaagccagaattctgttgttaacttggtctaatgccaaaacaggccagagacccctttcacctacttctctttaatcccaaacccatgtctctgtttgatctaagaaagagccaaatgcccaggatgcagcatggtagagaaaagcagccagccagagagtggcctccgtgccaggggagtgtgtctgagctttgctttatttttcttatttgtctgtagttgtgtgattggtagaagagagtggatatgaagtctactgacacaggattggtcttcaggaatgtcttaccaagcatttgggggaacagaggggtttcacaaataagagagcaatgatcagactttttctaaaaggagcagccataagctaccttaactctccaacttgcccattaatcttcacctagagttaggaagatttcaccattagctgtggcccataaaagatccttaagcttgacgaaccacagaggtcaatctccttgaagaggaagtgaaaggggtattgacagaagctgtgagctttctgtcctccgcaggcccccagctgtgtcttctacaagatagtctccaaatgatgttttctggctgacaataccacagaactgatccttatctcactatggaaatgaaagatttcaaagaattttgttgcctgaaatatggtactgtaatcacgtattaataaagctgctatccagaaataatgcagatttcaaaagaaaggctgttagcattctcagggacctaaaaactacaaattgtagaacaatggtaaatagatcttggaatcaggtagactttaattcaaaccccagctatgccacttattaacttatgtgacattgggaaagcctctcaaatttagatttgcaaaatcagaataaaataagtagccaacaaatagggtttaatggaggtaataatgaaggttattaagatgataaaattaaatagtgaatataaagtgcttagcattcaataaatttattgtatgatttcaaagcacatgcttttacctacagtgctataaagctgcttgcaatagtcaaagctaatagaagctcttgtcagagctaatagaagccttgagtatgtaattatttaagaattctgtaaatatacacaatagggtaggaatgagaaaatctttagaggaaatattcaagtacgtttgatttctagcaaatccagatagatagttttggcaacaaccaagtcataatttgaagtcttgttataggagctagaattttattcaagggacaactgacttgattagataagatactgtgcactgcatgtttgcatcaacaaatgcacatgttgaaactctaacaatagaatggcattagaaggaggacctttgggaagtaatttggttttgatgaggatggagttcccacaatggggttaacatcctaataagaagagtagaagactagagccctcttcactcagccatctgaagatacaacaagaacacctgcaaaccagtaagagggccttcaccagacactggctctgctggcccagattttaatctttgaattcccacaactgtgagaaacaagtatgtgctgtttaaaccacgcagtctacagttgtttgtagaagcagcctgagcagacaaagacatagggttcctttnnnnnnnnnnnnnnnnnnnnnnnnnnnnnnnnnnnnnnnnnnnnnnnnnnnnnnnnnnnnnnnnnnnnnnnnnnnnnnnnnnnnnnnnnnnnnnnnnnnnaacattctgagaaacttatttgtgatgtgtgcattcctctcacagagttgaacatttcttttgattaagcagttttgaaacacccttttgtggaatctgctagaggatatttggagcgctttgaggcctatggaggaaaaggaaatatcttcacttaaaaactagacagaagcattctgagaaacttctttgtgatgtttgcattcatctcacagagttgaaattttcttttgattgagcaattttgagacactctttttgtagaatctgcttgtggataataggagtgctttggggcatattttggaaaaggaaataccttcacataaatagtagacaaaagcattctgagaaacttctttgtgatgtgtgcatatatatcacagagttgaacctttcttttcatttagccttttgaaacactctttttgtagaatctgcaagtggatatttggagcgctttgcggcctatggtggaaaataaatatcttcacataaaaactagacagaagcaatctgagaaactactttgtgatgtgtgcattcatctcacagaggtgaacctttcttttgattgagcagttttgaaacactctttttgttgtatatgcaagtggatatttggagcgatttgtggtctatggtggaaaaggaaatatcttcacgtaaaaactagacagaagcactctgagaaacttctttgtgatgtgtgcattcatctcaccaagcggaaccattcttttgatggagctgttttgaaatactctttttgtagaatctgcaagtgaatatttggagtgctttcaggcctgtggtggaaaaggaagtatcttcacataaaaactagacagaagcattcggagaaacttctttttagtgtgtgcattcatctcacagtgttgaaactttcttttgattgagggttttgaaacagtctttttgataaatctgcaagtggatatttggagcgaattgtggcctatggtttaaaaggaaatatcttcacataaaagctagacagaagctttctgagaaacttctttgtgatatgtgcgttcatctcaccgggttgaatctttcctttcatcgagcaatattgaaacacccttttctttgaatctgaaatagatatttggagcgattgtgtcctatggtagtaaaggcaatattttcacagaaaaactagacagaagcattctgcaaaacttcctcgtgatgtgttcatttatctcaccaaattgaaccattcttttccttgagcagatttgatacactctttttgtagaatgtgcaagtgaatatttggaacgctttgatgagtttgacggaaaaggaaataccttcacatataaacgagacagaagcattctgagaaacttctttctgatatgtgcattcaactcactgagttgaacctttcttttgattcagcagttttgaaacacgctttttgaagaatctgtaagtggctatttggagtgcttaggggccgatggtggaatggaaatatctccacataaaaaacttgacagaagcattctgagaaacttctttgtgatgtgtgcattcatcagagagagtttaacatttcttttgactgagcagttttgaaactctctttttgtagaatctgcaagtggacatttggagccacttgaggcctattgtggaaaagggaataaatgcacataaaagctacacggaagcattctgacaaacttctttgtgatgtgcacattcatctcacagattgaaaatttcttttgattgagcagttttgaaatgctcttttcggagaatcagccagtggatatttggagcactttgaggactatggtggaaaaggaaatatcttcacataaaaactagaggaagcattctgagaaacttctttgtgatgtttgcattcatctcacagagttgaaattttcttttgattgagcaattttgagacactctttttgtagaatctgcctgtggataataggagtactttggggcatattttggaaaaggaaataccttcacataaatagtagacaaannnnnnnnnnnnnnnnnnnnnnnnnnnnnnnnnnnnnnnnnnnnnnnnnnnnnnnnnnnnnnnnnnnnnnnnnnnnnnnnnnnnnnnnnnnnnnnnnnnngttcttgcgatagtttactgagaatgatgacttccaatttcatccatgtccctaaaaaggttatgaactcatcactttttatggcttcatagtattccatggtgtatatagactggattaagaagattgagcagtttttaaagcatctttttgtagtatctgcaaggggatatttggagcgttttggggcctattgtggaaaaggaactatcttcacataaaaactagacagaagagcattctgagaaacttttggtgatctgtgcattcaactcacagatttcagcctttcttttgattgaacagttttgaaacactctttttgtagtatctgtaaatggatatttgaagcggtttgaggtctatcttggcaaaggaaatatcttcacatataaactagacagaagcattctgagaaacttctctgtgataagtgccttcatctcacagagttgaacctttcttttgattgagcagttttgaaacactatttttgttgtatatgcaagtgggtatttggagcgatttgtggtctatggttgaaaaggaaatatcttcacataaaaactagacggaaacactctgagaaacttctttgtgatgtgtgcattcatctcaccaagcttaaccattcttttgatggagctgttttgaaatactctttttgtagaatctgcaagtggatatttggagtgctttcaggcctgtggtggaaaaggaaatatcttcacataaaaactagacagaagcattcggagaaacttctttttagtgtgtgcattcatctcacagtgttgaaactttcttttgattgagggttttgaaacagtctttttgataaatctgcaagtggatatttggagcgaattgtggcctatggtttaaaaggaaatatcttcacataaaagctagacagaagctttctgagaaacttctttgtgatatgtgcgttcatctcaccgggttgaatctttcctttcatcgagcaatattgaaacacccttttctttgaatctgaaatagatatttggagcgattgtgtcctatggtagtaaaggcaatattttcacagaaaaactagacagaagcattctgcaaaacttcctcgtgatgtgttcatttatctcaccaaattgaaccattcttttccttgagcagatttgatacactctttttgtagaatgtgcaagtgaatatttggaacgctttgatgagtttgacggaaaaggaaataccttcacatataaacgagacagaagcattctgagaaacttctttctgatatgtgcattcaactcacagagttgaacctttcttttgattcagcagttttgaaacacactttttgaaggatctgtaagtggatatttggagtgcttaggggtcgatgctagaaaggaaatatctccacataaaaacttgatggaagcattctgagaaacttctttgtgatgtgtgcattcatcagagagagtttaacatttcttttgactgagcagttttgaaactctctttttgtagaatctgcaagtggacatttggagccacttgaggcctattgtggaaaagggaataaatgcacataaaagctacacggaagcattctgacaaacttctttgtgatgtgcacattcatctcacagattgaaaatttcttttgattgagcagttttgaaatgctcttttcggagaatcagccagtggatatttggagcactttgaggactatggtggaaaaggaaatatcttcacataaaaactagaggaaacattctgagaaacttatttgtgatgtgtgcattcctctcacagagttgaacatttcttttgattaagcagttttgaaacactcttttgtggaatctgctagaggatatttggagcgctttgaggcctatggaggaaaaggaaatatcttcacttaaaaactagacagaagcattctgagaaacttctttgtgatgtttgcattcatctcacagggttgaaattttcttttgattgagaagttttgagacactctttttgtagaatctgcctgtggataataggagcgctttggggcatattttggaaaaggaaataccttcacataaatagtagacagannnnnnnnnnnnnnnnnnnnnnnnnnnnnnnnnnnnnnnnnnnnnnnnnnnnnnnnnnnnnnnnnnnnnnnnnnnnnnnnnnnnnnnnnnnnnnnnnnnntctgtctagtttttatgtgaagatagttccttttccacaataggccccaaaacgctccaaatatccccttgcaaacactacaaaagattttttaaaaactgctaaatcttcttaatccagtctatatgcaccatggaatactatgcagccataaaaaatgatgagttcatatcctttttagggacatggatgaaattggaagtcatcattctcagtaaactatcgcaaaacaaaaaaccaaacaccgcatattctcactcataggtgggaattgaaaatgagatcacatggaagcattctgagaaacttctcttgtgatgtgtgcactcatctcacagagttgaacctttcttttgatcgagtagttttgaaacactctttttgtaccatctgcaagtgtatatttggagcgttttgcctcctatggtggaaaaggaaatatcttcacataaaaactagacagaaacactctgagaaacttctttgtgatgtgtgcattcatctcaccaagatgaaccattcttttgatggagctgttttgaaatactctttttgtagaatctgcaagtggatatttggagtgctttcaggcctgtggtggaaaaggaaatatcttcacataaaaactagacagaagcattcggagaaacttctttttagtgtgtgcattcatctcacagtgttgaaactttcttttgattgagggttttgaaacagtctttttgataaatctgcaagtggatatttggagcgaattgtggcctatggtttaaaaggaaatatcttcacataaaagctagacagaagctttctgagaaacttctttgtgatacgtgcgttcatctcaccgggttgaatctttcctttcatcgagcaatattgaaacacccttttctttgaatctgaaatagatatttggagcgattgtgtcctatggtagtaaaggcaatattttcacagaaaaactagacagaagcattctgcaaaacttcctcgtgatgtgttcatttatctcaccaaattgaaccattcttttccttgagcagatttgatacactctttttgtagaatgtgcaagtgaatatttggaacgctttgatgagtttgacggaaaaggaaataccttcacatataaacgagacagaagcattctgagaaacttctttctgatatgtgcattcaactcacagagttgaacctttcttttgattcagcagttttgaaacacactttttgaaggatctgtaagtggatatttggagtgcttaggggtcgatgctagaaaggaaatatctccacataaaaacttgatggaagcattctgagaaacttctttgtgatgtgtgcattcatcagagagagtttaacatttcttttgactgagcagttttgaaactctctttttgtagaatctgcaagtggacatttggagccacttgaggcctattgtggaaaagggaataaattcacataaaagctacacggaagcattctgacaaacttctttgtgatgtgcacattcatctcacagattgaaaatttcttttgattgagcagttttgaaatgctcttttcggagaatcagccagtggatatttggagcactttgaggactatggtggaaaaggaaatatcttcacataaaaactagaggaaacattctgagaaacttatttgtgatgtgtgcattcctctcacagagttgaacatttcttttgattaagcagttttgaaacactcttttgtggaatctgctagaggatatttggagcgctttgaggcctatggaggaaaaggaaatatcttcacttaaaaactagacagaagcattctgagaaacttctttgtgatgtttgcattcatctcacagggttgaaattttcttttgattgagaagttttgagacactctttttgtagaatctgcctgtggataataggagcgctttggggcatattttggaaaaggaaataccttcacataaatagtagacagannnnnnnnnnnnnnnnnnnnnnnnnnnnnnnnnnnnnnnnnnnnnnnnnnnnnnnnnnnnnnnnnnnnnnnnnnnnnnnnnnnnnnnnnnnnnnnnnnnntctgtctagtttttatgtgaagatagttccttttccacaataggccccaaaacgctccaaatatccccttgcaggcactacaaaaagattttttaaaaactgctaaatcttcttaatccagtctatatacaccatggaatactatgcagccataaaaaatgatgagttcatatcctttttagggacatggatgaaagcattctgagaaacttctctgtgatgtgtgcactcatctcacagagttgaacctttcttttgatcgagtagttttgaaacactctttttgtaccatctgcaagtgtatatttggagctttttgcctcctatggtggaaaaggaaatatcttcacataaaaactagacagaagcactctgagaaacttctttgtgatgtgtgcattcatctcaccaagcggaaccattcttttgatggagctgttttgaaatactctttttgtagaatctgcaagtgaatatttggagtgctttcaggcctgtggtggaaaaggaaatatcttcacataaaaactagacagaagcattcggagaaacttctttttagtgtgtgcattcatctcacagtgttgaaactttcttttgattgagggttttgaaacagtctttttgataaatctgcaagtggatatttggagcgaattgtggcctatggtttaaaaggaaatatcttcacataaaagctagacagaagctttctgagaaacttctttgtgatatgtgcgttcatctcaccgggttgaatctttcctttcatcgagcaatattgaaacacccttttctttgaatctgaaatagatatttggagcgattgtgtcctatggtagtaaaggcaatattttcacagaaaaactagacagaagcattctgcaaaacttcctcgtgatgtgttcatttatctcaccaaattgaaccattcttttccttgagcagatttgatacactctttttgtagaatgtgcaagtgaatatttggaacgctttgatgagtttgacggaaaaggaaataccttcacatataaacgagacagaagcattctgagaaacttctttctgatatgtgcattcaactcacagagttgaacctttcttttgattcagcagttttgaaacacactttttgaaggatctgtaagtggatatttggagtgcttaggggtcgatgctagaaaggaaatatctccacataaaaacttgatggaagcattctgagaaacttctttgtgatgtgtgcattcatcagagagagtttaacatttcttttgactgagcagttttgaaactctctttttgtagaatctgcaagtggacatttggagccacttgaggcctattgtggaaaagggaataaatgcacataaaagctacacggaagcattctgacaaacttctttgtgatgtgcacattcatctcacagattgaaaatttcttttgattgagcagttttgaaatgctcttttcggagaatcagccagtggatatttggagcactttgaggactatggtggaaaaggaaatatcttcacataaaaactagaggaaacattctgagaaacttatttgtgatgtgtgcattcctctcacagagttgaacatttcttttgattaagcagttttgaaacactcttttgtggaatctgctagaggatatttggagcgctttgaggcctatggaggaaaaggaaatatcttcacttaaaaactagacagaagcattctgagaaacttctttgtgatgtttgcattcatctcacagggttgaaattttcttttgattgagaagttttgagacactctttttgtagaatctgcctgtggataataggagcgctttggggcatattttggaaaaggaaataccttcacataaatagtagacagaagcattctgagaaatttttggcaatctgtgcattcaactcacagatttgaacctttcttttgattgaacagttttgaaacactctttttgtagtatctgtaaatggatatttgaagcggtttgaggtctatcgtggaaaaggaaatatcttcacatataaactagacagaagcattctgagaaacttctctgtgataagtgccttcatctcacagagttgaacctttcttttgattgagcagttttgaaacactctttttgttgtatatgcaagtgggtttttggagcgatttgtggtctctggtggaaaaggaaatatcttcacataaaaactagacagaagcactctgagaaacttctttgtgatgtgtgcattcatctcaccaagcggaaccattcttttgatggagctgttttgaaatactctttttgtagaatctgcaagtgaatatttggagtgctttcaggcctgtggtggaaaaggaaatatcttcacataaaaactagacagaagcattcggagaaacttctttttagtgtgtgcattcatctcacagtgttgaaactttcttttgattgagggttttgaaacagtctttttgataaatctgcaagtggatatttggagcgaattgtggcctatggtttaaaaggaaatatcttcacataaaagctagacagaagctttctgagaaacttctttgtgatatgtgcgttcatctcaccgggttgaatctttcctttcatcgagcaatattgaaacacccttttttttgaatctgaaatagatatttggagcgattgtgtcctatggtagtaaaggcaatattttcacagaaaaactagacagaagcattctgcaaaacttcctcgtgatgtgttcatttatctcaccaaattgaaccattcttttccttgagcagatttgatacactctttttgtagaatgtgcaagtgaatatttggaacgctttgatgagtttgacggaaaaggaaataccttcacatataaacgagacagaagcattctgagaaacttctttctgatatgtgcattcaactcacagagttgaacctttcttttgattcagcagttttgaaacacactttttgaaggatctgtaagtggatatttggagtgcttaggggtcgatgctagaaaggaaatatctccacataaaaacttgatggaagcattctgagaaacttctttgtgatgtgtgcattcatcagagagagtttaacatttcttttgactgagcagttttgaaactctctttttgtagaatctgcaagtggacatttggagccacttgaggcctattgtggaaaagggaataaatgcacataaaagctacacggaagcattctgacaaacttctttgtgatgtgcacattcatctcacagattgaaaatttcttttgattgagcagttttgaaatgctcttttcggagaatcagccagtggatatttggagcactttgaggactatggtggaaaaggaaatatcttcacataaaaactagaggaaacattctgagaaacttatttgtgatgtgtgcattcctctcacagagttgaacatttcttttgattaagcagttttgaaacactcttttgtggaatctgctagaggatatttggagcgctttgaggcctatggaggaaaaggaaatatcttcacttaaaaactagacagaagcattctgagaaacttctttgtgatgtttgcattcatctcacagggttgaaattttcttttgattgagaagttttgagacactctttttgtagaatctgcctgtggataataggagcgctttggggcatattttggaaaaggaaataccttcacataaatagtagacagaagcattctgagaaacttctttgtgacgtgtgcatatatatcacagagttgaacctttcttttcatttagccttttgaaacactctttttctagaatctgcaagtgaatatttggagcgctttgcggcctatggtggaaaataaatatcttcacataaaaactagacagaagcaatctgagaaactactttgtgatgtgtgcattcatctcacagagttgaacctttcttttgattgagcagttttgaaacactctttttgttgtatatgcaagtggatatttggagcgatttgtggtctatggtggaaaaggaaatatcttcacgtaaaaactagacagaagcactctgagaaacttctttgtgatgtgtgcattcatctcaccaagcggaaccattcttttgatggagctgttttgaaatactctttttgtagaatctgcaagtgaatatttggagtgctttcaggcctgtggtggaaaaggaaatatcttcacataaaaactagacagaagcattcggagaaacttctttttagtgtgtgcattcatctcacagtgttgaaactttcttttgattgagggttttgaaacagtctttttgataaatctgcaagtggatatttggagcgaattgtggcctatggtttaaaaggaaatatcttcacataaaagctagacagaagctttctgagaaacttctttgtgatatgtgcgttcatctcaccgggttgaatctttcctttcatcgagcaatattgaaacacccttttctttgaatctgaaatagatatttggagcgattgtgtcctatggtagtaaaggcaatattttcacagaaaaactagacagaagcattctgcaaaacttcctcgtgatgtgttcatttatctcaccaaattgaaccattcttttccttgagcagatttgatacactctttttgtagaatgtgcaagtgaatatttggaacgctttgatgagtttgacggaaaaggaaataccttcacatataaacgagacagaagcattctgagaaacttctttctgatatgtgcattcaactcacagagttgaacctttcttttgattcagcagttttgaaacacactttttgaaggatctgtaagtggatatttggagtgcttaggggtcgatgctagaaaggaaatatctccacataaaaacttgatggaagcattctgagaaacttctttgtgatgtgtgcattcatcagagagagtttaacatttcttttgactgagcagttttgaaactctctttttgtagaatctgcaagtggacatttggagccacttgaggcctattgtggaaaagggaataaatgcacataaaagctacacggaagcattctgacaaacttctttgtgatgtgcacattcatctcacagattgaaaatttcttttgattgagcagttttgaaatgctcttttcggagaatcagccagtggatatttggagcactttgaggactatggtggaaaaggaaatatcttcacataaaaactagaggaaacattctgagaaacttatttgtgatgtgtgcattcctctcacagagttgaacatttcttttgattaagcagttttgaaacacccttttgtggaatctgctagaggatatttggagcgctttgaggcctatggaggaaaaggaaatatcttcacttaaaaactagacagaagcattctgagaaacttctttgtgatgtttgcattcatctcacagggttgaaattttctttcgattgagaagttttgagacactctttttgtagaatctgcctgtggataataggagcgctttggggcatattttggaaaaggaaataccttcacataaatagtagacagaagcattctgagaaacttctttgtgacgtgtgcatatatatcacagagttgaacctttcttttcatttagccttttgaaacactctttttctagaatctgcaagtgaatatttggagcgctttgcggcctatggtggaaaataaatatcttcacataaaaactagacagaagcaatctgagaaactactttgtgatgtgtgcattcatctcacagagttgaacctttcttttgattgagcagttttgaaacactctttttgttgtatatgcaagtggatatttggagcgatttgtggtctatggtggaaaaggaaatatcttcacgtaaaaactagacagaagcactctgagaaacttctttgtgatgtgtgcattcatctcaccaagcggaaccattcttttgatggagctgttttgaaatactctttttgtagaatctgcaagtgaatatttggagtgctttcaggcctgtggtggaaaagggaatatcttcacataaaaactagacagaagcattcggagaaacttctttttagtgtgtgcattcatctcacagtgttgaaactttcttttgattgagggttttgaaacagtctttttgataaatctgcaagtggatatttggagcgaattgtggcctatggtttaaaaggaaatatcttcacataaaagctagacagaagctttctgagaaacttctttgtgatatgtgcgttcatctcaccgggttgaatctttcctttcatcgagcaatattgaaacacccttttttttgaatctgaaatagatatttggagcgattgtgtcctatggtagtaaaggcaatattttcacagaaaaactagacagaagcattctgcaaaacttcctcgtgatgtgttcatttatctcaccaaattgaaccattcttttccttgagcagatttgatacactctttttgtagaatgtgcaagtgaatatttggaacgctttgatgagtttgacggaaaaggaaataccttcacatataaacgagacagaagcattctgagaaacttctttctgatatgtgcattcaactcacagagttgaacctttcttttgattcagcagttttgaaacacactttttgaaggatctgtaagtggatatttggagtgcttaggggtcgatgctagaaaggaaatatctccacataaaaacttgatggaagcattctgagaaacttctttgtgatgtgtgcattcatcagagagagtttaacatttcttttgactgagcagttttgaaactctctttttgtagaatctgcaagtggacatttggagccacttgaggcctattgtggaaaagggaataaatgcacataaaagctacacggaagcattctgacaaacttctttgtgatgtgcacattcatctcacagattgaaaatttcttttgattgagcagttttgaaatgctcttttcggagaatcagccagtggatatttggagcactttgaggactatggtggaaaaggaaatatcttcacataaaaactagaggaaacattctgagaaacttatttgtgatgtgtgcattcctctcacagagttgaacatttcttttgattaagcagttttgaaacactcttttgtggaatctgctagaggatatttggagcgctttgaggcctatggaggaaaaggaaatatcttcacttaaaaactagacagaagcattctgagaaacttctttgtgatgtttgcattcatctcacagggttgaaattttcttttgattgagaagttttgagacactctttttgtagaatctgcctgtggataataggagcgctgtggggcatattttggaaaaggaaataccttcacataaatagtagacagaagcattctgagaaacttctttgtgacgtgtgcatatatatcacagagttgaacctttcttttcatttacccttttgaaacactctttttctagaatctgcaagtgaatatttggagcgctttgcggcctatggtggaaaataaatatcttcacataaaaactagacagaagcaatctgagaaactactttgtgatgtgtgcattcatctcacagaggtgaacctttcttttgattgagcagttttgaaacactctttttgttgtatatgcaagtggatatttggagcgatttgtggtctatggtggaaaaggaaatatcttcacgtaaaaactagacagaagcactctgagaaacttctttgtgatgtgtgcattcatctcaccaagcggaaccattcttttgatggagctgttttgaaatactctttttgtagaatctgcaagtgaatatttggagtgctttcaggcctgtggtggaaaaggaaatatcttcacataaaaactagacagaagcattcggagaaacttctttttagtgtgtgcattcatctcacagtgttgaaactttcttttgattgagggttttgaaacagtctttttgataaatctgcaagtggatatttggagcgaattgtggcctatggtttaaaaggaaatatcttcacataaaagctagacagaagctttctgagaaacttctttgtgatatgtgcgttcatctcaccgggttgaatctttcctttcatcgagcaatattgaaacacccttttctttgaatctgaaatagatatttggagcgattgtgtcctatggtagtaaaggcaatattttcacagaaaaactagacagaagcattctgcaaaacttcctcgtgatgtgttcatttatctcaccaaattgaaccattcttttccttgagcagatttgatacactctttttgtagaatgtgcaagtgaatatttggaacgctttgatgagtttgacggaaaaggaaataccttcacatataaacgagacagaagcattctgagaaacttttctctgatatgtgcattcaactcacagagttgaacctttcttttgattcagcagttttgaaacacgctttttgaagaatctataagtggatatttggagtgcttaggggccgatggcggaaaaggaaatatctccacataaaaactagatggaagcattctgagaaacttctttgtgatgtgtgcattcatcagagagagtttaacatttcttttgactgagcagttttgaaactctctttttgtagaatctgcaagtggacatttggagccacttgaggcctattgtggaaaagggaataaatgcacataaaagctacacggaagcattctgacaaacttctttgtgatgtgcacattcatctcacagattgaaaatttcttttgattgagcagttttgaaatgctcttttcggagaatcagccagtggatatttggagcactttgaggactatggtggaaaaggaaatatcttcacataaaaactagaggaaacattctgagaaacttatttgtgatgtgtgcattcctctcacagagttgaacatttcttttgattaagcagttttgaaacactcttttgtggaatctgctagaggatatttggagcgctttgaggcctatggaggaaaaggaaatatcttcacttaaaaactagacagaagcattctgagaaacttctttgtgatgtttgcattcatctcacagggttgaaattttcttttgattgagaagttttgagacactctttttgtagaatctgcctgtggataataggagcgctttggggcatattttggaaaaggaaataccttcacataaatagtagacagaagcattctgagaaacttctttgtgacgtgtgcatatatatcacagagttgaacctttcttttcatttagccttttgaaacactctttttctagaatctgcaagtgaatatttggagcgctttgcggcctatggtggaaaataaatatcttcacataaaaactagacagaagcaatctgaaaaactactttgtgatgtgtgcattcatctcacagaggtgaacctttcttttgattgagcagttttgaaacactctttttgttgtatatgcaagtggatatttggagcgatttgtggtctatggtggaaaaggaaatatcttcacgtaaaaactagacagaagcactctgagaaacttctttgtgatgtgtgcattcatctcaccaagcggaaccattcttttgatggagctgttttgaaatactctttttgtagaatctgcaagtgaatatttggagtgctttcaggcctgtggtggaaaaggaaatatcttcacataaaaactagacagaagcattcggagaaacttctttttagtgtgtgcattcatctcacagtgttgaaactttcttttgattgagggttttgaaacagtctttttgataaatctgcaagtggatatttggagcgaattgtggcctatggtttaaaaggaaatatcttcacataaaagctagacagaagctttctgagaaacttctttgtgatatgtgcgttcatctcaccgggttgaatctttcctttcatcgagcaatattgaaacacccttttttttgaatctgaaatagatatttggagcgattgtgtcctatggtagtaaaggcaatattttcacagaaaaactagacagaagcattctgcaaaacttcctcgtgatgtgttcatttatctcaccaaattgaaccattcttttccttgagcagatttgatacactctttttgtagaatgtgcaagtgaatatttggaacgctttgatgagtttgacggaaaaggaaataccttcacatataaacgagacagaagcattctgagaaacttctttctgatatgtgcattcaactcacagagttgaacctttcttttgattcagcagttttgaaacacactttttgaaggatctgtaagtggatatttggagtgcttaggggtcgatgctagaaaggaaatatctccacataaaaacttgatggaagcattctgagaaacttctttgtgatgtgtgcattcatcagagagagtttaacatttcttttgactgagcagttttgaaactctctttttgtagaatctgcaagtggacatttggagccacttgaggcctattgtggaaaagggaataaatgcacataaaagctacacggaagcattctgacaaacttctttgtgatgtgcacattcatctcacagattgaaaatttcttttgattgagcagttttgaaatgctcttttcggagaatcagccagtggatatttggagcactttgaggactatggtggaaaaggaaatatcttcacataaaaactagaggaaacattctgagaaacttatttgtgatgtgtgcattcctctcacagagttgaacatttcttttgattaagcagttttgaaacactcttttgtggaatctgctagaggatatttggagcgctttgaggcctatggaggaaaaggaaatatcttcacttaaaaactagacagaagcattctgagaaacttctttgtgatgtttgcattcatctcacagggttgaaattttcttttgattgagaagttttgagacactctttttgtagaatctgcctgtggataataggagcgctttggggcatattttggaaaaggaaataccttcacataaatagtagacagaagcattctgagaaagttctttgtgacgtgtgcatatatatcacagagttgaacctttcttttcatttagccttttgaaacactctttttctagaatctgcaagtgaatatttggagcgctttgcggcctatggtggaaaataaatatcttcacataaaaactagacagaagcaatctgagaaactactttgtgatgtgtgcattcatctcacagagttgaacctttcttttgattgagcagttttgaaacactctttttgttgtatatgcaagtggatatttggagcgatttgtggtctatggtggaaaaggaaatatcttcacgtaaaaactagacagaagcactctgagaaacttctttgtgatgtgtgcattcatctcaccaagcggaaccattcttttgatggagctgttttgaaatactctttttgtagaatctgcaagtgaatatttggagtgctttcaggcctgtggtggaaaaggaaatatcttcacataaaaactagacagaagcattcggagaaacttctttttagtgtgtgcattcatctcacagtgttgaaactttcttttgattgagggttttgaaacagtctttttgataaatctgcaagtggatatttggagcgaattgtggcctatggtttaaaaggaaatatcttcacataaaagctagacagaagctttctgagaaacttctttgtgatacgtgcgttcatctcaccgggttgaatctttcctttcatcgagcaatattgaaacacccttttctttgaatctgaaatagatatttggagcgattgtgtcctatggtagtaaaggcaatattttcacagaaaaactagacagaagcattctgcaaaacttcctcgtgatgtgttcatttatctcaccaaattgaaccattcttttccttgagcagatttgatacactctttttgtagaatgtgcaagtgaatatttggaacgctttgatgagtttgacggaaaaggaaataccttcacatataaacgagacagaagcattctgagaaacttctttctgatatgtgcattcaactcacagagttgaacctttcttttgattcagcagttttgaaacacactttttgaaggatctgtaagtggatatttggagtgcttaggggtcgatgctagaaaggaaatatctccacataaaaacttgatggaagcattctgagaaacttctttgtgatgtgtgcattcatcagagagagtttaacatttcttttgactgagcagttttgaaactctctttttgtagaatctgcaagtggacatttggagccacttgaggcctattgtggaaaagggaataaatgcacataaaagctacacggaagcattctgacaaacttctttgtgatgtgcacattcatctcacagattgaaaatttcttttgattgagcagttttgaaatgctcttttcggagaatcagccagtggatatttggagcactttgaggactatggtggaaaaggaaatatcttcacataaaaactagaggaaacattctgagaaacttatttgtgatgtgtgcattcctctcacagagttgaacatttcttttgattaagcagttttgaaacacccttttgtggaatctgctagaggatatttggagcgctttgaggcctatggaggaaaaggaaatatcttcacttaaaaactagacagaagcattctgagagacttctttgtgatgtttgcattcatctcacagggttgaaattttcttttgattgagaagttttgagacactctttttgtagaatctgcctgtggataataggagcgctttggggcatattttggaaaaggaaataccttcacataaatagtagacagaagcattctgagaaacttctttgtgacgtgtgcatatatatcacagagttgaacctttcttttcatttagccttttgaaacactctttttctagaatctgcaagtgaatatttggagcgctttgcggcctatggtggaaaataaatatcttcacataaaaactagacagaagcaatctgagaaactactttgtgatgtgtgcattcatctcacagaggtgaacctttcttttgattgagcagttttgaaacactctttttgttgtatatgcaagtggatatttggagcgatttgtggtctatggtggaaaaggaaatatcttcacgtaaaaactagacagaagcactctgagaaacttctttgtgatgtgtgcattcatctcaccaagcggaaccattcttttgatggagctgttttgaaatactctttttgtagaatctgcaagtgaatatttggagtgctttcaggcctgtggtggaaaaggaaatatcttcacataaaaactagacagaagcattcggagaaacttctttttagtgtgtgcattcatctcacagtgttgaaactttcttttgattgagggttttgaaacagtctttttgataaatctgcaagtggatatttggagcgaattgtggcctatggtttaaaaggaaatatcttcacataaaagctagacagaagctttctgagaaacttctttgtgatatgtgcgttcatctcaccgggttgaatctttcctttcatcgagcaatattgaaacacccttttctttgaatctgaaatagatatttggagcgattgtgtcctatggtagtaaaggcaatattttcacagaaaaactagacagaagcattctgcaaaacttcctcgtgatgtgttcatttatctcaccaaattgaaccattcttttccttgagcagatttgatacactctttttgtagaatgtgcaagtgaatatttggaacgctttgatgagtttgacggaaaaggaaataccttcacatataaacgagacagaagcattctgagaaacttctttctgatatgtgcattcaactcacagagttgaacctttcttttgattcagcagttttgaaacacactttttgaaggatctgtaagtggatatttggagtgcttaggggtcgatgctagaaaggaaatatctccacataaaaacttgatggaagcattctgagaaacttctttgtgatgtgtgcattcatcagagagagtttaacatttcttttgactgagcagttttgaaactctctttttgtagaatctgcaagtggacatttggagccacttgaggcctattgtggaaaagggaataaattcacataaaagctacacggaagcattctgagaaacttctttgtgatgtgcacattcatctcacagtatttgaaaatttcttttgattgagcagttttgaaatgctctttttggagaattggccagtggatatttggagcgctttgaggactatggtggaaaaggaaatatcttcacataaaaactagaggaaacattctgagaaacttatttgtgatgtgtgcattcctctcacagagttgaacatttcttttgattaagcagttttgaaacacccttttgtggaatctgctagaggatatttggagcgctttgaggcctatggaggaaaaggaaatatcttcacttaaaaactagacagaagcattctgagaaacttctttgtgatgtttgcattcatctcacagggttgaaattttctttcgattgagaagttttgagacactctttttgtagaatctgcctgtggataataggagcgctgtggggcatattttggaaaaggaaataccttcacataaatagtagacagaagcattctgagaaacttctttgtgacgtgtgcatatatatcacagagttgaacctttcttttcatttagccttttgaaacactctttttctagaatctgcaagtgaatatttggagcgctttgcggcctatggtggaaaataaatatcttcacataaaaactagacagaagcaatctgagaaactactttgtgatgtgtgcattcatctcacagagttgaacctttcttttgattgagcagttttgaaacactctttttgttgtatatgcaagtggatatttggagcgatttgtggtctatggtggaaaaggaaatatcttcacgtaaaaactagacagaagcactctgagaaacttctttgtgatgtgtgcattcatctcaccaagcggaaccattcttttgatggagctgttttgaaatactctttttgtagaatctgcaagtgaatatttggagtgctttcaggcctgtggtggaaaaggaaatatcttcacataaaaactagacagaagcattcggagaaacttctttttagtgtgtgcattcatctcacagtgttgaaactttcttttgattgagggttttgaaacagtctttttgataaatctgcaagtggatatttggagcgaattgtggcctatggtttaaaaggaaatatcttcacataaaagctagacagaagctttctgagaaacttctttgtgatatgtgcgttcatctcaccgggttgaatctttcctttcatcgagcaatattgaaacacccttttctttgaatctgaaatacatatttggagcgattgtgtcctatggtagtaaaggcaatattttcacagaaaaactagacagaagcattctgcaaaacttcctcgtgatgtgttcatttatctcaccaaattgaaccattcttttccttgagcagatttgatacactctttttgtagaatgtgcaagtgaatatttggaacgctttgatgagtttgacggaaaaggaaataccttcacatataaacgagacagaagcattctgagaaacttctttctgatatgtgcattcaactcacagagttgaacctttcttttgattcagcagttttgaaacacactttttgaaggatctgtaagtggatatttggagtgcttaggggtcgatgctagaaaggaaatatctccacataaaaacttgatggaagcattctgagaaacttctttgtgatgtgtgcattcatcagagagagtttaacatttcttttgactgagcagttttgaaactctctttttgtagaatctgcaagtggacatttggagccacttgaggcctattgtggaaaagggaataaatgcacataaaagctacacggaaagcattctgacaaacttctttgtgatgtgcacattcatctcacagattgaaaatttcttttgattgagcagttttgaaatgctcttttcggagaatcagccagtggatatttggagcactttgaggactatggtggaaaaggaaatatcttcacataaaaactagaggaaaacattctgagaaacttatttgtgatgtgtgcattcctctcacagagttgaacatttcttttgattaagcagttttgaaacactcttttgtggaatctgctagaggatatttggagcgctttgaggcctatggaggaaaaggaaatatcttcacttaaaaactagacagaagcattctgagaaacttctttgtgatgtttgcattcatctcacagggttgaaattttcttttgattgagaagttttgagacactctttttgtagaatctgcctgtggataataggagcgctttggggcatattttggaaaaggaaataccttcacataaatagtagacagaagcattctgagaaacttctttgtgacgtgtgcatatatatcacagagttgaacctttcttttcatttagccttttgaaacactctttttctagaatctgcaagtgaatatttggagcgctttgcggcctatggtggaaaataaatatcttcacataaaaactagacagaagcattctgagaaacttctctgtgataagtgccttcatctcacagagttgaacctttcttttgattgagcagttttgaaacactctttttgttgtatatgcaagtggatatttggagcgatttgtggtctatggtggaaaaggaaatatcttcacgtaaaaactagacagaagcactctgagaaacttctttgtgatgtgtgcattcatctcaccaagcggaaccattcttttgatggagctgttttgaaatactctttttgtagaatctgcaagtgaatatttggagtgctttcaggcctgtggtggaaaaggaaatatcttcacataaaaactagacagaagcattcggagaaacttctttttagtgtgtgcattcatctcacagtgttgaaactttcttttgattgagggttttgaaacagtctttttgataaatctgcaagtggatatttggagcgaattgtggcctatggtttaaaaggaaatatcttcacataaaagctagacagaagctttctgagaaacttctttgtgatatgtgcgttcatctcaccgggttgaatctttcctttcatcgagcaatattgaaacacccttttctttgaatctgaaatagatatttggagcgattgtgtcctatggtagtaaaggcaatattttcacagaaaaactagacagaagcattctgcaaaacttcctcgtgatgtgttcatttatctcaccaaattgaaccattcttttccttgagcagatttgatacactctttttgtagaatgtgcaagtgaatatttggaacgctttgatgagtttgacggaaaaggaaataccttcacatataaacgagacagaagcattctgagaaacttctttctgatatgtgcattcaactcacagagttgaacctttcttttgattcagcagttttgaaacacactttttgaaggatctgtaagtggatatttggagtgcttaggggtcgatgctagaaaggaaatatctccacataaaaacttgatggaagcattctgagaaacttctttgtgatgtgtgcattcatcagagagagtttaacatttcttttgactgagcagttttgaaactctctttttgtagaatctgcaagtggacatttggagccacttgaggcctatcgtggaaaagggaataaatgcacataaaagctacacggaagcattctgacaaacttctttgtgatgtgcacattcatctcacagattgaaaatttcttttgattgagcagttttgaaatgctcttttcggagaatcagccagtggatatttggagcactttgaggactatggtggaaaaggaaatatcttcacataaaaactagaggaaacattctgagaaacttatttgtgatgtgtgcattcctctcacagagttgaacatttcttttgattaagcagttttgaaacacccttttgtggaatctgctagaggatatttggagcgctttgaggcctatggaggaaaaggaaatatcttcacttaaaaactagacagaagcattctgagaaacttctttgtgatgtttgcattcatctcacagggttgaaattttcttttgattgagaagttttgagacactctttttgtagaatctgcctgtggataataggagcgctttggggcatattttggaaaaggaaataccttcacataaatagtagacagaagcattctgagaaacttctttgtgacgtgtgcatatatatcacagagttgaacctttcttttcatttagccttttgaaacactctttttctagaatctgcaagtgaatatttggagcgctttgcggcctatggtggaaaataaatatcttcacataaaaactagacagaagcaatctgaaaaactactttgtgatgtgtgcattcatctcacagaggtgaacctttcttttgattgagcagttttgaaacactctttttgttgtatatgcaagtggatatttggagcgatttgtggtctatggtggaaaaggaaatatcttcacgtaaaaactagacagaagcactctgagaaacttctttgtgatgtgtgcattcatctcaccaagcggaaccattcttttgatggagctgttttgaaatactctttttgtagaatctgcaagtgaatatttggagtgctttcaggcctgtggtggaaaaggaaatatcttcacataaaaactagacagaagcattcggagaaacttctttttagtgtgtgcattcatctcacagtgttgaaactttcttttgattgagggttttgaaacagtctttttgataaatctgcaagtggatatttggagcgaattgtggcctatggtttaaaaggaaatatcttcacataaaagctagacagaagctttctgagaaacttctttgtgatatgtgcgttcatctcaccgggttgaatctttcctttcatcgagcaatattgaaacacccttttctttgaatctgaaatagatatttggagcgattgtgtcctatggtagtaaaggcaatattttcacagaaaaactagacagaagcattctgcaaaacttcctcgtgatgtgttcatttatctcaccaaattgaaccattcttttccttgagcagatttgatacactctttttgtagaatgtgcaagtgaatatttggaacgctttgatgagtttgacggaaaaggaaataccttcacatataaacgagacagaagcattctgagaaacttctttctgatatgtgcattcaactcacagagttgaacctttcttttgattcagcagttttgaaacacactttttgaaggatctgtaagtggatatttggagtgcttaggggtcgatgctagaaaggaaatatctccacataaaaacttgatggaagcattctgagaaacttctttgtgatgtgtgcattcatcagagagagtttaacatttcttttgactgagcagttttgaaactctctttttgtagaatctgcaagtggacatttggagccacttgaggcctattgtggaaaagggaataaattcacataaaagctacacggaagcattctgacaaacttctttgtgatgtgcacattcatctcacagattgaaaatttcttttgattgagcagttttgaaatgctcttttcggagaatcagccagtggatatttggagcactttgaggactatggtggaaaaggaaatatcttcacataaaaactagaggaaacattctgagaaacttatttgtgatgtgtgcattcctctcacagagttgaacatttcttttgattaagcagttttgaaacactcttttgtggaatctgctagaggatatttggagcgctttgaggcctatggaggaaaaggaaatatcttcacttaaaaactagacagaagcattctgagaaacttctttgtgatgtttgcattcatctcacagggttgaaattttcttttgattgagaagttttgagacactctttttgtagaatctgcctgtggataataggagcgctttggggcatattttggaaaaggaaataccttcacataaatagtagacagaagcattctgagaaagttctttgtgacgtgtgcatatatatcacagagttgaacctttcttttcatttagccttttgaaacactctttttctagaatctgcaagtgaatatttggagcgctttgcggcctatggtggaaaataaatatcttcacataaaaactagacagaagcaatctgagaaactactttgtgatgtgtgcattcatctcacagagttgaacctttcttttgattgagcagttttgaaacactctttttgttgtatatgcaagtggatatttggagcgatttgtggtctatggtggaaaaggaaatatcttcacgtaaaaactagacagaagcactctgagaaacttctttgtgatgtgtgcattcatctcaccaagcggaaccattcttttgatggagctgttttgaaatactctttttgtagaatctgcaagtgaatatttggagtgctttcaggcctgtggtggaaaaggaaatatcttcacataaaaactagacagaagcattcggagaaacttctttttagtgtgtgcattcatctcacagtgttgaaactttcttttgattgagggttttgaaacagtctttttgataaatctgcaagtggatatttggagcgaattgtggcctatggtttaaaaggaaatatcttcacataaaagctagacagaagctttctgagaaacttctttgtgatatgtgcgttcatctcaccgggttgaatctttcctttcatcgagcaatattgaaacacccttttctttgaatctgaaatagatatttggagcgattgtgtcctatggtagtaaaggcaatattttcacagaaaaactagacagaagcattctgcaaaacttcctcgtgatgtgttcatttatctcaccaaattgaaccattcttttccttgagcagatttgatacactctttttgtagaatgtgcaagtgaatatttggaacgctttgatgagtttgacggaaaaggaaataccttcacatataaacgagacagaagcattctgagaaacttctttctgatatgtgcattcaactcacagagttgaacctttcttttgattcagcagttttgaaacacactttttgaaggatctgtaagtggatatttggagtgcttaggggtcgatgctagaaaggaaatatctccacataaaaacttgatggaagcattctgagaaacttctttgtgatgtgtgcattcatcagagagagtttaacatttcttttgactgagcagttttgaaactctctttttgtagaatctgcaagtggacatttggagccacttgaggcctattgtggaaaagggaataaatgcacataaaagctacacggaagcattctgacaaacttctttgtgatgtgcacattcatctcacagattgaaaatttcttttgattgagcagttttgaaatgctcttttcggagaatcagccagtggatatttggagcactttgaggactatggtggaaaaggaaatatcttcacataaaaactagaggaaacattctgagaaacttatttgtgatgtgtgcattcctctcacagagttgaacatttcttttgattaagcagttttgaaacactcttttgtggaatctgctagaggatatttggagcgctttgaggcctatggaggaaaaggaaatatcttcacttaaaaactagacagaagcattctgagacacttctttgtgatgtttgcattcatctcacagggttgaaattttcttttgattgagaagttttgagacactctttttgtagaatctgcctgtggataataggagcgctttggggcatattttggaaaaggaaataccttcacataaatagtagacagaagcattctgagaaacttctttgtgacgtgtgcatatatatcacagagttgaacctttcttttcatttagccttttgaaacactctttttctagaatctgcaagtgaatatttggagcgctttgcggcctatggtggaaaataaatatcttcacataaaaactagacagaagcaatctgagaaactactttgtgatgtgtgcattcatctcacagaggtgaacctttcttttgattgagcagttttgaaacactctttttgttgtatatgcaagtggatatttggagcgatttgtggtctatggtggaaaaggaaatatcttcacgtaaaaactagacagaagcactctgagaaacttctttgtgatgtgtgcattcatctcaccaagcggaaccattcttttgatggagctgttttgaaatactctttttgtagaatctgcaagtgaatatttggagtgctttcaggcctgtggtggaaaaggaaatatcttcacataaaaactagacagaagcattcggagaaacttctttttagtgtgtgcattcatctcacagtgttgaaactttcttttgattgagggttttgaaacagtctttttgataaatctgcaagtggatatttggagcgaattgtggcctatggtttaaaaggaaatatcttcacataaaagctagacagaagctttctgagaaacttctttgtgatatgtgcgttcatctcaccgggttgaatctttcctttcatcgagcaatattgaaacacccttttctttgaatctgaaatagatatttggagcgattgtgtcctatggtagtaaaggcaatattttcacagaaaaactagacagaagcattctgcgaaacttcctcatgatgtgttcatttatctcaccaaattgaaccattcttttcactgagaagatttgatacactctttttgtagaatgtgcaagggaatatttggaacgctttgatgagtatgatggaaaaggaaataccttcacatataaactagatagaagcattctgagaaacttttctctgatatgtgcattcaactcacagagttgaacctttcttttgattcagcagttttgaaacacgctttttgaagaatctataagtggatatttggagtgcttaggggccgatggcggaaaaggaaatatctccacataaaaactagatggaagcattctgagaaacttctttgtgatgtgtgcattcatcagagagagtttaacatttcttttgactgagcagttttgaaactctctttttgtagaatctgcaagtggacatttggagccacttgaggcctattgtggaaaagggaataaatgcacataaaagctacacggaagcattctgacaaacttctttgtgatgtgcacattcatctcacagattgaaaatttcttttgattgagcagttttgaaatgctcttttcggagaatcagccagtggatatttggagcactttgaggactatggtggaaaaggaaatatcttcacataaaaactagaggaaacattctgagaaacttatttgtgatgtgtgcattcctctcacagagttgaacatttcttttgattaagcagttttgaaacactcttttgtggaatctgctagaggatatttggagcgctttgaggcctatggaggaaaaggaaatatcttcacttaaaaactagacagaagcattctgagaaacttctttgtgatgtttgcattcatctcacagggttgaaattttcttttgattgagaagttttgagacactctttttgtagaatctgcctgtggataataggagcgctttggggcatattttggaaaaggaaataccttcacataaatagtagacagaagcattctgagaaacttctttgtgacgtgtgcatatatatcacagagttgaacctttcttttcatttagccttttgaaacactctttttctagaatctgcaagtgaatatttggagcgctttgcggcctatggtggaaaataaatatcttcacataaaaactagacagaagcaatctgagaaactactttgtgatgtgtgcattcatctcacagaggtgaacctttcttttgattgagcagttttgaaacactctttttgttgtatatgcaagtggatatttggagcgatttgtggtctatggtggaaaaggaaatatcttcacgtaaaaactagacagaagcactctgagaaacttctttgtgatgtgtgcattcatctcaccaagcggaaccattcttttgatggagctgttttgaaatactctttttgtagaatctgcaagtgaatatttggagtgctttcaggcctgtggtggaaaaggaaatatcttcacataaaaactagacagaagcattcggagaaacttctttttagtgtgtgcattcatctcacagtgttgaaactttcttttgattgagggttttgaaacagtctttttgataaatctgcaagtggatatttggagcgaattgtggcctatggtttaaaaggaaatatcttcacataaaagctagacagaagctttctgagaaacttctttgtgatatgtgcgttcatctcaccgggttgaatctttcctttcatcgagcaatattgaaacacccttttctttgaatctgaaatagatatttggagcgattgtgtcctatggtagtaaaggcaatattttcacagaaaaactagacagaagcattctgcaaaacttcctcgtgatgtgttcatttatctcaccaaattgaaccattcttttccttgagcagatttgatacactctttttgtagaatgtgcaagtgaatatttggaacgctttgatgagtttgacggaaaaggaaataccttcacatataaacgagacagaagcattctgagaaacttctttctgatatgtgcattcaactcacagagttgaacctttcttttgattcagcagttttgaaacacactttttgaaggatctgtaagtggatatttggagtgcttaggggtcgatgctagaaaggaaatatctccacataaaaacttgatggaagcattctgagaaacttctttgtgatgtgtgcattcatcagagagagtttaacatttcttttgactgagcagttttgaaactctctttttgtagaatctgcaagtggacatttggagccacttgaggcctattgtggaaaagggaataaattcacataaaagctacacggaagcattctgacaaacttctttgtgatgtgcacattcatctcacagattgaaaatttcttttgattgagcagttttgaaatgctcttttcggagaatcagccagtggatatttggagcactttgaggactatggtggaaaaggaaatatcttcacataaaaactagaggaaacattctgagaaacttatttgtgatgtgtgcattcctctcacagagttgaacatttcttttgattaagcagttttgaaacactcttttgtggaatctgctagaggatatttggagcgctttgaggcctatggaggaaaaggaaatatcttcacttaaaaactagacagaagcattctgagaaacttctttgtgatgtttgcattcatctcacagggttgaaattttcttttgattgagaagttttgagacactctttttgtagaatctgcctgtggataataggagcgctttggggcatattttggaaaaggaaataccttcacataaatagtagacagactgtgtccatgtgatctcattgttcaattcccacctatgagtgagaatatgcggtgtttggttttttgttcttgcgatagtttactgagaatgatgacttccaatttcatccatgtccctaaaaaggttatgaactcatcactttttatggcttcatagtattccatggtgtatatagactggattaagaagattgagcagtttttaaagcatctttttgtagtatctgcaaggggatatttggagcgttttggggcctattgtggaaaaggaactatcttcacataaaaactagacagaagnnnnnnnnnnnnnnnnnnnnnnnnnnnnnnnnnnnnnnnnnnnnnnnnnnnnnnnnnnnnnnnnnnnnnnnnnnnnnnnnnnnnnnnnnnnnnnnnnnnnagcaatctgagaaactactttgtgatgtgtgcattcatctcacagagttgaacctttcttttgattgagcagttttgaaacactctttttgttgtatatgcaagtggatatttggagcgatttgtggtctatggtggaaaaggaaatatcttcacgtaaaaactagacagaagcactctgagaaacttctttgtgatgtgtgcattcatctcaccaagcggaaccattcttttgatggagctgttttgaaatactctttttgtagaatctgcaagtgaatatttggagtgctttcaggcctgtggtggaaaaggaaatatcttcacataaaaactagacagaagcattcggagaaacttctttttagtgtgtgcattcatctcacagtgttgaaactttcttttgattgagggttttgaaacagtctttttgataaatctgcaagtggatatttggagcgaattgtggcctatggtttaaaaggaaatatcttcacataaaagctagacagaagctttctgagaaacttctttgtgatatgtgcgttcatctcaccgggttgaatctttcctttcatcgagcaatattgaaacacccttttctttgaatctgaaatacatatttggagcgattgtgtcctatggtagtaaaggcaatattttcacagaaaaactagacagaagcattctgcaaaacttcctcgtgatgtgttcatttatctcaccaaattgaaccattcttttccttgagcagatttgatacactctttttgtagaatgtgcaagtgaatatttggaacgctttgatgagtttgacggaaaaggaaataccttcacatataaacgagacagaagcattctgagaaacttctttctgatatgtgcattcaactcacagagttgaacctttcttttgattcagcagttttgaaacacactttttgaaggatctgtaagtggatatttggagtgcttaggggtcgatgctagaaaggaaatatctccacataaaaacttgatggaagcattctgagaaacttctttgtgatgtgtgcattcatcagagagagtttaacatttcttttgactgagcagttttgaaactctctttttgtagaatctgcaagtggacatttggagccacttgaggcctattgtggaaaagggaataaatgcacataaaagctacacggaagcattctgacaaacttctttgtgatgtgcacattcatctcacagattgaaaatttcttttgattgagcagttttgaaatgctcttttcggagaatcagccagtggatatttggagcactttgaggactatggtggaaaaggaaatatcttcacataaaaactagaggaaacattctgagaaacttatttgtgatgtgtgcattcctctcacagagttgaacatttcttttgattaagcagttttgaaacactcttttgtggaatctgctagaggatatttggagcgctttgaggcctatggaggaaaaggaaatatcttcacttaaaaactagacagaagcattctgagaaacttctttgtgatgtttgcattcatctcacagggttgaaattttcttttgattgagaagttttgagacactctttttgtagaatctgcctgtggataataggagcgctttggggcatattttggaaaaggaaataccttcacataaatagtagacagaagcattctgagaaacttctttgtgacgtgtgcatatatatcacagagttgaacctttcttttcatttagccttttgaaacactctttttctagaatctgcaagtgaatatttggagcgctttgcggcctatggtggaaaataaatatcttcacataaaaactagacagaagcaatctgagaaactactttgtgatgtgtgcattcatctcacagagttgaacctttcttttgattgagcagttttgaaacactctttttgttgtatatgcaagtggatatttggagcgatttgtggtctatggtggaaaaggaaatatcttcacgtaaaaactagacagaagcactctgagaaacttctttgtgatgtgtgcattcatctcaccaagcggaaccattcttttgatggagctgttttgaaatactctttttgtagaatctgcaagtgaatatttggagtgctttcaggcctgtggtggaaaagggaatatcttcacataaaaactagacagaagcattcggagaaacttctttttagtgtgtgcattcatctcacagtgttgaaactttcttttgattgagggttttgaaacagtctttttgataaatctgcaagtggatatttggagcgaattgtggcctatggtttaaaaggaaatatcttcacataaaagctagacagaagctttctgagaaacttctttgtgatatgtgcgttcatctcaccgggttgaatctttcctttcatcgagcaatattgaaacacccttttttttgaatctgaaatagatatttggagcgattgtgtcctatggtagtaaaggcaatattttcacagaaaaactagacagaagcattctgcaaaacttcctcgtgatgtgttcatttatctcaccaaattgaaccattcttttccttgagcagatttgatacactctttttgtagaatgtgcaagtgaatatttggaacgctttgatgagtttgacggaaaaggaaataccttcacatataaacgagacagaagcattctgagaaacttctttctgatatgtgcattcaactcacagagttgaacctttcttttgattcagcagttttgaaacacactttttgaaggatctgtaagtggatatttggagtgcttaggggtcgatgctagaaaggaaatatctccacataaaaacttgatggaagcattctgagaaacttctttgtgatgtgtgcattcatcagagagagtttaacatttcttttgactgagcagttttgaaactctctttttgtagaatctgcaagtggacatttggagccacttgaggcctattgtggaaaagggaataaatgcacataaaagctacacggaagcattctgacaaacttctttgtgatgtgcacattcatctcacagattgaaaatttcttttgattgagcagttttgaaatgctcttttcggagaatcagccagtggatatttggagcactttgaggactatggtggaaaaggaaatatcttcacataaaaactagaggaaacattctgagaaacttatttgtgatgtgtgcattcctctcacagagttgaacatttcttttgattaagcagttttgaaacacccttttgtggaatctgctagaggatatttggagcgctttgaggcctatggaggaaaaggaaatatcttcacttaaaaactagacagaagcattctgagaaacttctttgtgatgtttgcattcatctcacagggttgaaattttcttttgattgagaagttttgagacactctttttgtagaatctgcctgtggataataggagcgctttggggcatattttggaaaaggaaataccttcacataaatagtagacagaagcattctgagaaacttctttgtgacgtgtgcatatatatcacagagttgaacctttcttttcatttagccttttgaaacactctttttctagaatctgcaagtgaatatttggagcgctttgcggcctatggtggaaaataaatatcttcacataaaaactagacagaagcaatctgagaaactactttgtgatgtgtgcattcatctcacagaggtgaacctttcttttgattgagcagttttgaaacactctttttgttgtatatgcaagtggatatttggagcgatttgtggtctatggtggaaaaggaaatatcttcacgtaaaaactagacagaagcactctgagaaacttctttgtgatgtgtgcattcatctcaccaagcggaaccattcttttgatggagctgttttgaaatactctttttgtagaatctgcaagtgaatatttggagtgctttcaggcctgtggtggaaaaggaaatatcttcacataaaaactagacagaagcattcggagaaacttctttttagtgtgtgcattcatctcacagtgttgaaactttcttttgattgagggttttgaaacagtctttttgataaatctgcaagtggatatttggagcgaattgtggcctatggtttaaaaggaaatatcttcacataaaagctagacagaagctttctgagaaacttctttgtgatatgtgcgttcatctcaccgggttgaatctttcctttcatcgagcaatattgaaacacccttttctttgaatctgaaatagatatttggagcgattgtgtcctatggtagtaaaggcaatattttcacagaaaaactagacagaagcattctgcaaaacttcctcgtgatgtgttcatttatctcaccaaattgaaccattcttttccttgagcagatttgatacactctttttgtagaatgtgcaagtgaatatttggaacgctttgatgagtttgacggaaaaggaaataccttcacatataaacgagacagaagcattctgagaaacttctttctgatatgtgcattcaactcacagagttgaacctttcttttgattcagcagttttgaaacacactttttgaaggatctgtaagtggatatttggagtgcttaggggtcgatgctagaaaggaaatatctccacataaaaacttgatggaagcattctgagaaacttctttgtgatgtgtgcattcatcagagagagtttaacatttcttttgactgagcagttttgaaactctctttttgtagaatctgcaagtggacatttggagccacttgaggcctattgtggaaaagggaataaatgcacataaaagctacacggaagcattctgacaaacttctttgtgatgtgcacattcatctcacagattgaaaatttcttttgattgagcagttttgaaatgctcttttcggagaatcagccagtggatatttggagcactttgaggactatggtggaaaaggaaatatcttcacataaaaactagaggaaacattctgagaaacttatttgtgatgtgtgcattcctctcacagagttgaacatttcttttgattaagcagttttgaaacacccttttgtggaatctgctagaggatatttggagcgctttgaggcctatggaggaaaaggaaatatcttcacttaaaaactagacagaagcattctgagagacttctttgtgatgtttgcattcatctcacagggttgaaattttcttttgattgagaagttttgagacactctttttgtagaatctgcctgtggataataggagcgctttggggcatattttggaaaaggaaataccttcacataaatagtagacagaagcattctgaggaaacttctttgtgacgtgtgcatatatatcacagagttgaacctttcttttcatttagccttttgaaacactctttttctagaatctgcaagtgaatatttggagcgctttgcggcctatggtggaaaataaatatcttcacataaaaactagacagaagcaatctgagaaactactttgtgatgtgtgcattcatctcacagagttgaacctttcttttgattgagcagttttgaaacactctttttgttgtatatgcaagtggatatttggagcgatttgtggtctatggtggaaaaggaaatatcttcacgtaaaaactagacagaagcactctgagaaacttctttgtgatgtgtgcattcatctcaccaagcggaaccattcttttgatggagctgttttgaaatactctttttgtagaatctgcaagtgaatatttggagtgctttcaggcctgtggtggaaaaggaaatatcttcacataaaaactagacagaagcattcggagaaacttctttttagtgtgtgcattcatctcacagtgttgaaactttcttttgattgagggttttgaaacagtctttttgataaatctgcaagtggatatttggagcgaattgtggcctatggtttaaaaggaaatatcttcacataaaagctagacagaagctttctgagaaacttctttgtgatatgtgcgttcatctcaccgggttgaatctttcctttcatcgagcaatattgaaacacccttttttttgaatctgaaatagatatttggagcgattgtgtcctatggtagtaaaggcaatattttcacagaaaaactagacagaagcattctgcaaaacttcctcgtgatgtgttcatttatctcaccaaattgaaccattcttttccttgagcagatttgatacactctttttgtagaatgtgcaagtgaatatttggaacgctttgatgagtttgacggaaaaggaaataccttcacatataaacgagacagaagcattctgagaaacttctttctgatatgtgcattcaactcacagagttgaacctttcttttgattcagcagttttgaaacacactttttgaaggatctgtaagtggatatttggagtgcttaggggtcgatgctagaaaggaaatatctccacataaaaacttgatggaagcattctgagaaacttctttgtgatgtgtgcattcatcagagagagtttaacatttcttttgactgagcagttttgaaactctctttttgtagaatctgcaagtggacatttggagccacttgaggcctattgtggaaaagggaataaatgcacataaaagctacacggaagcattctgagaaacttctttgtgatgtacagattcctctcacagatttgaaaatttcttttgattgagcagttttgaaatgttctttttggagaatcggccagtggatatttggagcgctttgaggactatggtggaaaaggaaatatcttcacataaaaactagaggaaaacattctgagaaacttatttgtgatgtgtgcattcctctcacagagttgaacatttcttttgattaagcagttttgaaacacccttttgtggaatctgctagaggatatttggagcgctttgaggcctatggaggaaaaggaaatatcttcacttaaaaactagacagaagcattctgagaaacttctttgtgatgtttgcattcatctcacagggttgaaattttcttttgattgagaagttttgagacactctttttgtagaatctgcctgtggataataggagcgctgtggggcatattttggaaaaggaaataccttcacataaatagtagacagannnnnnnnnnnnnnnnnnnnnnnnnnnnnnnnnnnnnnnnnnnnnnnnnnnnnnnnnnnnnnnnnnnnnnnnnnnnnnnnnnnnnnnnnnnnnnnnnnnntctgtctagtttttatgtgaagatagttccttttccacaataggccccaaaacgctccaaatatccccttgcagatactacaaaaagatgctttaaaaactgctcaatcttcttaatccagtctatatacaccatggaatactatgaagccataaaaagtgatgagttcataacctttttagggacatggatgaaattggaagtcatcattctcagtaaactatcgcaagaacaaaaaaccaaacaccgcatattctcactcataggtgggaattgaacaatgagatcacatggacacaggaagggaacatcacactctggggactgttgtgggagcaatctgagaaactactttgtgatgtgtgcattcatctcacagagttgaacctttcttttgattgagcagttttgaaacactctttttgttgtatatgcaagtggatatttggagcgatttgtggtctatggtggaaaaggaaatatcttcacgtaaaaactagacagaagcactctgagaaacttctttgtgatgtgtgcattcatctcaccaagcggaaccattcttttgatggagctgttttgaaatactctttttgtagaatctgcaagtgaatatttggagtgctttcaggcctgtggtggaaaaggaaatatcttcacataaaaactagacagaagcattcggagaaacttctttttagtgtgtgcattcatctcacagtgttgaaactttcttttgattgagggttttgaaacagtctttttgataaatctgcaagtggatatttggagcgaattgtggcctatggtttaaaaggaaatatcttcacataaaagctagacagaagctttctgagaaacttctttgtgatatgtgcgttcatctcaccgggttgaatctttcctttcatcgagcaatattgaaacacccttttttttgaatctgaaatagatatttggagcgattgtgtcctatggtagtaaaggcaatattttcacagaaaaactagacagaagcattctgcaaaacttcctcgtgatgtgttcatttatctcaccaaattgaaccattcttttccttgagcagatttgatacactctttttgtagaatgtgcaagtgaatatttggaacgctttgatgagtttgacggaaaaggaaataccttcacatataaacgagacagaagcattctgagaaacttctttctgatatgtgcattcaactcacagagttgaacctttcttttgattcagcagttttgaaacacactttttgaaggatctgtaagtggatatttggagtgcttaggggtcgatgctagaaaggaaatatctccacataaaaacttgatggaagcattctgagaaacttctttgtgatgtgtgcattcatcagagagagtttaacatttcttttgactgagcagttttgaaactctctttttgtagaatctgcaagtggacatttggagccacttgaggcctattgtggaaaagggaataaatgcacataaaagctacacggaagcattctgacaaacttctttgtgatgtgcacattcatctcacagattgaaaatttcttttgattgagcagttttgaaatgctcttttcggagaatcagccagtggatatttggagcactttgaggactatggtggaaaaggaaatatcttcacataaaaactagaggaaacattctgagaaacttatttgtgatgtgtgcattcctctcacagagttgaacatttcttttgattaagcagttttgaaacacccttttgtggaatctgctagaggatatttggagcgctttgaggcctatggaggaaaaggaaatatcttcacttaaaaactagacagaagcattctgagaaacttctttgtgatgtttgcattcatctcacagggttgaaattttcttttgattgagaagttttgagacactctttttgtagaatctgcctgtggataataggagcgctttggggcatattttggaaaaggaaataccttcacataaatagtagacagaagcattctgagaaacttctttgtgacgtgtgcatatatatcacagagttgaacctttcttttcatttagccttttgaaacactctttttctagaatctgcaagtgaatatttggagcgctttgcggcctatggtggaaaataaatatcttcacataaaaactagacagaagcaatctgagaaactactttgtgatgtgtgcattcatctcacagagttgaacctttcttttgattgagcagttttgaaacactctttttgttgtatatgcaagtggatatttggagcgatttgtggtctatggtggaaaaggaaatatcttcacgtaaaaactagacagaagcactctgagaaacttctttgtgatgtgtgcattcatctcaccaagcggaaccattcttttgatggagctgttttgaaatactctttttgtagaatctgcaagtgaatatttggagtgctttcaggcctgtggtggaaaaggaaatatcttcacataaaaactagacagaagcattcggagaaacttctttttagtgtgtgcattcatctcacagtgttgaaactttcttttgattgagggttttgaaacagtctttttgataaatctgcaagtggatatttggagcgaattgtggcctatggtttaaaaggaaatatcttcacataaaagctagacagaagctttctgagaaacttctttgtgatatgtgcgttcatctcaccgggttgaatctttcctttcatcgagcaatattgaaacacccttttctttgaatctgaaatagatatttggagcgattgtgtcctatggtagtaaaggcaatattttcacagaaaaactagacagaagcattctgcaaaacttcctcgtgatgtgttcatttatctcaccaaattgaaccattcttttccttgagcagatttgatacactctttttgtagaatgtgcaagtgaatatttggaacgctttgatgagtttgacggaaaaggaaataccttcacatataaacgagacagaagcattctgagaaacttctttctgatatgtgcattcaactcacagagttgaacctttcttttgattcagcagttttgaaacacactttttgaaggatctgtaagtggatatttggagtgcttaggggtcgatgctagaaaggaaatatctccacataaaaacttgatggaagcattctgagaaacttctttgtgatgtgtgcattcatcagagagagtttaacatttcttttgactgagcagttttgaaactctctttttgtagaatctgcaagtggacatttggagccacttgaggcctattgtggaaaagggaataaatgcacataaaagctacacggaagcattctgacaaacttctttgtgatgtgcacattcatctcacagattgaaaatttcttttgattgagcagttttgaaatgctcttttcggagaatcagccagtggatatttggagcactttgaggactatggtggaaaaggaaatatcttcacataaaaactagaggaaaacattctgagaaacttatttgtgatgtgtgcattcctctcacagagttgaacatttcttttgattaagcagttttgaaacacccttttgtggaatctgctagaggatatttggagcgctttgaggcctatggaggaaaaggaaatatcttcacttaaaaactagacagaagcattctgagaaacttctttgtgatgtttgcattcatctcacagggttgaaattttctttcgattgagaagttttgagacactctttttgtagaatctgcctgtggataataggagcgctgtggggcatattttggaaaaggaaataccttcacataaatagtagacagaagcattctgagaaacttctttgtgacgtgtgcatatatatcacagagttgaacctttcttttcatttagccttttgaaacactctttttctagaatctgcaagtgaatatttggagcgctttgcggcctatggtggaaaataaatatcttcacataaaaactagacagaagcaatctgagaaactactttgtgatgtgtgcattcatctcacagagttgaacctttcttttgattgagcagttttgaaacactctttttgttgtatatgcaagtggatatttggagcgatttgtggtctatggtggaaaaggaaatatcttcacgtaaaaactagacagaagcactctgagaaacttctttgtgatgtgtgcattcatctcaccaagcggaaccattcttttgatggagctgttttgaaatactctttttgtagaatctgcaagtgaatatttggagtgctttcaggcctgtggtggaaaaggaaatatcttcacataaaaactagacagaagcattcggagaaacttctttttagtgtgtgcattcatctcacagtgttgaaactttcttttgattgagggttttgaaacagtctttttgataaatctgcaagtggatatttggagcgaattgtggcctatggtttaaaaggaaatatcttcacataaaagctagacagaagctttctgagaaacttctttgtgatatgtgcgttcatctcaccgggttgaatctttcctttcatcgagcaatattgaaacacccttttctttgaatctgaaatagatatttggagcgattgtgtcctatggtagtaaaggcaatattttcacagaaaaactagacagaagcattctgcaaaacttcctcgtgatgtgttcatttatctcaccaaattgaaccattcttttccttgagcagatttgatacactctttttgtagaatgtgcaagtgaatatttggaacgctttgatgagtttgacggaaaaggaaataccttcacatataaacgagacagaagcattctgagaaacttctttctgatatgtgcattcaactcacagagttgaacctttcttttgattcagcagttttgaaacacactttttgaaggatctgtaagtggatatttggagtgcttaggggtcgatgctagaaaggaaatatctccacataaaaacttgatggaagcattctgagaaacttctttgtgatgtgtgcattcatcagagagagtttaacatttcttttgactgagcagttttgaaactctctttttgtagaatctgcaagtggacatttggagccacttgaggcctattgtggaaaagggaataaatgcacataaaagctacacggaagcattctgacaaacttctttgtgatgtgcacattcatctcacagattgaaaatttcttttgattgagcagttttgaaatgctcttttcggagaatcagccagtggatatttggagcactttgaggactatggtggaaaaggaaatatcttcacataaaaactagaggaaacattctgagaaacttatttgtgatgtgtgcattcctctcacagagttgaacatttcttttgattaagcagttttgaaacactcttttgtggaatctgctagaggatatttggagcgctttgaggcctatggaggaaaaggaaatatcttcacttaaaaactagacagaagcattctgagaaacttctttgtgatgtttgcattcatctcacagggttgaaattttcttttgattgagaagttttgagacactctttttgtagaatctgcctgtggataataggagcgctttggggcatattttggaaaaggaaataccttcacataaatagtagacagaagcattctgagaaacttctttgtgacgtgtgcatatatatcacagagttgaacctttcttttcatttagccttttgaaacactctttttctagaatctgcaagtgaatatttggagcgctttgcggcctatggtggaaaataaatatcttcacataaaaactagacagaagcattctgagaaacttctctgtgataagtgccttcatctcatagagttgaacctttcttttgattgagcagttttgaaacactctttttgttgtatatgcaagtgggtatttggagcgatttgtggtctatggtggaaaaggaaatatcttcacataaaaactagaaggaaacactctgagaaacttctttgtgatgtgtgcattcatctcaccaagctgaaccattcttttgatggagctgttttgaaatactctttttgtaggatctgcaagtggatatttggagtgctttcaggtctgtggtggaaaaggaaatatcttcacataaaaactagacagaagtattctgagaaacttctttgtaatgtgtgcattcatctcacagtgttgaaactttcttttgattgagggttttgaaacagtctttttgatacaactgcaagtggatatttggagcgaattgtggcctatggtttaaaaggaaatatcttcacataaaaactagacagaagccttctgagaaacttctttgtgatgtgtgcgttcatctcactgggttgaatctttcctttcatcgagcagtattgaaacaccctttttgtagaatctgaaagtagatatttggagcgattgtgtcctatggtagtaaaggaaatattttcacagaaaaactagacagaagcattctgcaaaacttcctcgtgttgtgttcacttatgtcaccaaattgaaccattgttttcattgagcagatttgatacactctttttgtagcatgtgcaagtgaatatttggaacgctttgatgagtatgacggaaaaggaaataccttcacatataaactagacagaagcattctgagaaacttctctgtgatgtgtgcactcatctcacagagttgaacctttcttttgatcgagtagttttgaaacactctttttgtaccatctgcaagtgtatatttggagcgttttgcctcctatggtggaaaaggaaatatcttcacataaaaactagacagatgcattctgagaaacttctttgtgatatgtgcattcatgtcacagaggtgaacttctagtgttttggactcatccaagcctcaacattagttttaaggctccttgttctttccagcaggagaaaaatgaacatgcaaagctctcaggctcattgttataatcctctcaaggatcagtctcattagcagacagcagagtcttgatcccttgtttcaccaaactaaccacttggctgagagaagttgctcttagtcctaggggaacttctcataacctttgcaagctcttcaagtatttgtgtattttcccctttcagaaagttgtgtttatctcagcatcccattgtcatctccaaaattaaataattgtgaaggatctaagatttcatcctatttgtaaacaaacctattaatcttccattttcatggatgctggtagaaggcataacgcactgaagtatgaaaacaaacctactatttactgtctacctggaggcaaaagcctcatttttgtattagttctccttgtccnnnnnnnnnnnnnnnnnnnnnnnnnnnnnnnnnnnnnnnnnnnnnnnnnnnnnnnnnnnnnnnnnnnnnnnnnnnnnnnnnnnnnnnnnnnnnnnnnnnnagcattcggagaaacttctttttagtgtgtgcattcatctcacagtgttgaaactttcttttgattgagggttttgaaacagtctttttgataaatctgcaagtggatatttggagcgaattgtggcctatggtttaaaaggaaatatcttcacataaaagctagacagaagctttctgagaaacttctttgtgatatgtgcgttcatctcaccgggttgaatctttcctttcatcgagcaatattgaaacacccttttttttgaatctgaaatagatatttggagcgattgtgtcctatggtagtaaaggcaatattttcacagaaaaactagacagaagcattctgcaaaacttcctcgtgatgtgttcatttatctcaccaaattgaaccattcttttccttgagcagatttgatacactctttttgtagaatgtgcaagtgaatatttggaacgctttgatgagtttgacggaaaaggaaataccttcacatataaacgagacagaagcattctgagaaacttctttctgatatgtgcattcaactcacagagttgaacctttcttttgattcagcagttttgaaacacactttttgaaggatctgtaagtggatatttggagtgcttaggggtcgatgctagaaaggaaatatctccacataaaaacttgatggaagcattctgagaaacttctttgtgatgtgtgcattcatcagagagagtttaacatttcttttgactgagcagttttgaaactctctttttgtagaatctgcaagtggacatttggagccacttgaggcctattgtggaaaagggaataaattcacataaaagctacacggaagcattctgacaaacttctttgtgatgtgcacattcatctcacagattgaaaatttcttttgattgagcagttttgaaatgctcttttcggagaatcagccagtggatatttggagcactttgaggactatggtggaaaaggaaatatcttcacataaaaactagaggaaacattctgagaaacttatttgtgatgtgtgcattcctctcacagagttgaacatttcttttgattaagcagttttgaaacacccttttgtggaatctgctagaggatatttggagcgctttgaggcctatggaggaaaaggaaatatcttcacttaaaaactagacagatctgtctagtttttatgtgaagatagttccttttccacaataggccccaaaacgctccaaatatccccttgcaaacactacaaaagattttttaaaaactgctaaatcttcttaatccagtctatatgcaccatggaatactatgcagccataaaaaatgatgagttcatatcctttttagggacatggatgaaattggaagtcatcattctcagtaaactatcgcaaaacaaaaaaccaaacaccgcatattctcactcataggtgggaattgaaaaatgagatcacatggacacaggaaggggaacatcacactctggggatgtttgtggggtgggaggannnnnnnnnnnnnnnnnnnnnnnnnnnnnnnnnnnnnnnnnnnnnnnnnnnnnnnnnnnnnnnnnnnnnnnnnnnnnnnnnnnnnnnnnnnnnnnnnnnnagcattctgagaaacttttggtgatctgtgcattcaactcacagatttgaacctttcttttgattgaacagttttgaaacactctttttgtagtatctgtaaatggatatttgaagcggtttgaggtctatcttggaaaaggaaatatcttcacatataaactagacagaagcattctgagaaacttctctgtgataagtgccttcatctcacagagttgaacctttcttttgattgagcagttttgaaacactctttttgttgtatatgcaagtggctatttggagcgatttgtggtctgtggtggaaaaggaaatatcttcacataaaaactagacagaaacactctgagaaacttctttgtgatgtgtgcattcatctcaccaagatgaaccattcttttgatggagctgttttgaaatactctttttgtagaatctgcaagtggatatttggagtgctttcaggtctgtggtggaaaaggaaatatcttcacataaaaactagacagaagcattcggagaaacttctttttagtgtgtgcattcatctcacagtgttgaaactttcttttgattgagggttttgaaacagtctttttgataaatctgcaagtggatatttggagcgaattgtggcctatggtttaaaaggaaatatcttcacataaaagctagacagaagctttctgagaaacttctttgtgatatgtgcgttcatctcaccgggttgaatctttcctttcatcgagcaatattgaaacacccttttctttgaatctgaaatagatatttggagcgattgtgtcctatggtagtaaaggcaatattttcacagaaaaactagacagaagcattctgcaaaacttcctcgtgatgtgttcatttatctcaccaaattgaaccattcttttccttgagcagatttgatacactctttttgtagaatgtgcaagtgaatatttggaacgctttgatgagtttgacggaaaaggaaataccttcacatataaacgagacagaagcattctgagaaacttctttctgatatgtgcattcaactcacagagttgaacctttcttttgattcagcagttttgaaacacactttttgaaggatctgtaagtggatatttggagtgcttaggggtcgatgctagaaaggaaatatctccacataaaaacttgatggaagcattctgagaaacttctttgtgatgtgtgcattcatcagagagagtttaacatttcttttgactgagcaattttgaaactctctttttgtagaatctgcaagtggacatttggagccacttgaggcctattgtggaaaagggaataaatgcacataaaagctacacggaagcattctgacaaacttctttgtgatgtgcacattcatctcacagattgaaaatttcttttgattgagcagttttgaaatgctcttttcggagaatcagccagtggatatttggagcactttgaggactatggtggaaaaggaaatatcttcacataaaaactagaggaaacattctgagaaacttatttgtgatgtgtgcattcctctcacagagttgaacatttcttttgattaagcagttttgaaacactcttttgtggaatctgctagaggatatttggagcgctttgaggcctatggaggaaaaggaaatatcttcacttaaaaactagacagaagcattctgagaaacttctttgtgatgtttgcattcatctcacagggttgaaattttctttcgattgagaagttttgagacactctttttgtagaatctgcctgtggataataggagcgctttggggcatattttggaaaaggaaataccttcacataaatagtagacagaagcattctgagaaacttctttgtgacgtgtgcatatatatcacagagttgaacctttcttttcatttagccttttgaaacactctttttctagaatctgcaagtgaatatttggagcgctttgcggcctatggtggaaaataaatatcttcacataaaaactagacagaagcaatctgagaaactactttgtgatgtgtgcattcatctcacagagttgaacctttcttttgattgagcagttttgaaacactctttttgttgtatatgcaagtggatatttggagcgatttgtggtctatggtggaaaaggaaatatcttcacgtaaaaactagacagaagcactctgagaaacttctttgtgatgtgtgcattcatctcaccaagcggaaccattcttttgatggagctgttttgaaatactctttttgtagaatctgcaagtgaatatttggagtgctttcaggcctgtggtggaaaaggaaatatcttcacataaaaactagacagaagcattcggagaaacttctttttagtgtgtgcattcatctcacagtgttgaaactttcttttgattgagggttttgaaacagtctttttgataaatctgcaagtggatatttggagcgaattgtggcctatggtttaaaaggaaatatcttcacataaaagctagacagaagctttctgagaaacttctttgtgatatgtgcgttcatctcaccgggttgaatctttcctttcatcgagcaatattgaaacacccttttttttgaatctgaaatagatatttggagcgattgtgtcctatggtagtaaaggcaatattttcacagaaaaactagacagaagcattctgcaaaacttcctcgtgatgtgttcatttatctcaccaaattgaaccattcttttccttgagcagatttgatacactctttttgtagaatgtgcaagtgaatatttggaacgctttgatgagtttgacggaaaaggaaataccttcacatataaacgagacagaagcattctgagaaacttctttctgatatgtgcattcaactcacagagttgaacctttcttttgattcagcagttttgaaacacactttttgaaggatctgtaagtggatatttggagtgcttaggggtcgatgctagaaaggaaatatctccacataaaaacttgatggaagcattctgagaaacttctttgtgatgtgtgcattcatcagagagagtttaacatttcttttgactgagcagttttgaaactctctttttgtagaatctgcaagtggacatttggagccacttgaggcctattgtggaaaagggaataaatgcacataaaagctacacggaagcattctgacaaacttctttgtgatgtgcacattcatctcacagattgaaaatttcttttgattgagcagttttgaaatgctcttttcggagaatcagccagtggatatttggagcactttgaggactatggtggaaaaggaaatatcttcacataaaaactagaggaaacattctgagaaacttatttgtgatgtgtgcattcctctcacagagttgaacatttcttttgattaagcagttttgaaacacccttttgtggaatctgctagaggatatttggagcgctttgaggcctatggaggaaaaggaaatatcttcacttaaaaactagacagaagcattctgagagacttctttgtgatgtttgcattcatctcacagggttgaaattttcttttgattgagaagttttgagacactctttttgtagaatctgcctgtggataataggagcgctttggggcatattttggaaaaggaaataccttcacataaatagtagacagaagcattctgagaaacttctttgtgacgtgtgcatatatatcacagagttgaacctttcttttcatttagccttttgaaacactctttttctagaatctgcaagtgaatatttggagcgctttgcggcctatggtggaaaataaatatcttcacataaaaactagacagaagcaatctgagaaactactttgtgatgtgtgcattcatctcacagaggtgaacctttcttttgattgagcagttttgaaacactctttttgttgtatatgcaagtggatatttggagcgatttgtggtctatggtggaaaaggaaatatcttcacgtaaaaactagacagaagcactctgagaaacttctttgtgatgtgtgcattcatctcaccaagcggaaccattcttttgatggagctgttttgaaatactctttttgtagaatctgcaagtgaatatttggagtgctttcaggcctgtggtggaaaagggaatatcttcacataaaaactagacagaagcattcggagaaacttctttttagtgtgtgcattcatctcacagtgttgaaactttcttttgattgagggttttgaaacagtctttttgataaatctgcaagtggatatttggagcgaattgtggcctatggtttaaaaggaaatatcttcacataaaagctagacagaagctttctgagaaacttctttgtgatatgtgcgttcatctcaccgggttgaatctttcctttcatcgagcaatattgaaacacccttttttttgaatctgaaatagatatttggagcgattgtgtcctatggtagtaaaggcaatattttcacagaaaaactagacagaagcattctgcaaaacttcctcgtgatgtgttcatttatctcaccaaattgaaccattcttttccttgagcagatttgatacactctttttgtagaatgtgcaagtgaatatttggaacgctttgatgagtttgacggaaaaggaaataccttcacatataaacgagacagaagcattctgagaaacttctttctgatatgtgcattcaactcacagagttgaacctttcttttgattcagcagttttgaaacacactttttgaaggatctgtaagtggatatttggagtgcttaggggtcgatgctagaaaggaaatatctccacataaaaacttgatggaagcattctgagaaacttctttgtgatgtgtgcattcatcagagagagtttaacatttcttttgactgagcagttttgaaactctctttttgtagaatctgcaagtggacatttggagccacttgaggcctattgtggaaaagggaataaatgcacataaaagctacacggaagcattctgacaaacttctttgtgatgtgcacattcatctcacagattgaaaatttcttttgattgagcagttttgaaatgctcttttcggagaatcagccagtggatatttggagcactttgaggactatggtggaaaaggaaatatcttcacataaaaactagaggaaacattctgagaaacttatttgtgatgtgtgcattcctctcacagagttgaacatttcttttgattaagcagttttgaaacactcttttgtggaatctgctagaggatatttggagcgctttgaggcctatggaggaaaaggaaatatcttcacttaaaaactagacagaagcattctgagacacttctttgtgatgtttgcattcatctcacagggttgaaattttcttttgattgagaagttttgagacactctttttgtagaatctgcctgtggataataggagcgctttggggcatattttggaaaaggaaataccttcacataaatagtagacagaagcattctgagaaacttctttgtgacgtgtgcatatatatcacagagttgaacctttcttttcatttagccttttgaaacactctttttctagaatctgcaagtgaatatttggagcgctttgcggcctatggtggaaaataaatatcttcacataaaaactagacagaagcaatctgagaaactactttgtgatgtgtgcattcatctcacagagttgaacctttcttttgattgagcttttttgaaacactctttttgtataatctgcaagtggatatttggagcgctttgaggcttatggtggaaaatgaaacatattcacgtaaaaactagacagcaacactctgagaaacttctttgtgatgtgtgcattcatctcaccaagttgaaccattcttttgatggagctgttttgaaatactctttttgtaggatctgcaagtggatatttggagtgctttcaggttctgtggtggaaaaggaaatatcttcacataaaaactagacagaagcattctgagaaacttctctgtgataagtgccttcatctcacagagttgaacctttcttttgattgagcagttttgaaacactctttttgttgtatatgcaagtgggtatttggagcgatttgtggtctctggtggaaaaggaaatatcttcacataaaaactagacagaagcactctgagaaacttctttgtgatgtgtgcattcatctcacagtgttgaaactttcttttgattgagggttttgaaacagtctttttgatgaatctgcaagtggatatttggagcgaattgtggcctatggtgtaaaaggaaatatcttcacataaaaactagacagaagccttctgagaaacttctttgtgatgtgtgcgttcatctcaccaggttgaatctttcctttcatcgagcagtattgaaacaccctttttgtagaatctgaaagtagatatttggagcgattgtgtcctatggtagtaaaggcaatattttcacagaaaaactagacagaagcattctgcgaaacttcctcatgatgtgttcatttatctcaccaaattgaaccattcttttcactgagcagatttgatacactctttttgtagaatgtgcaagtgaatatttggaacgctttgatgagtatgatggaaaaggaaataccttcacatataaactagatagaagcattctgagaaacttttctctgatatgtgcattcaactcacagagttgaacctttcttttgattcagcagttttgaaacatgctttttgaagaatctataagtggatatttggagtgcttaggggccgatggcggaaaaggaaatatctccacataaaaactagatggaagcattctgagaaacttctttgtgatgtgtgcattcatcagagagagtttaacctttcttttgactgagcagttttgaaactctctttttgtagaatctgcaagtggacttttggagacacttgaggcctattgtggaaaatggaatatcttcacataaaagctacacagaagcattctgagaaacttctttgtgatgtgcacattcatctcacagatttgaaaatttcttttgattgagcagttttgaaatgctctttttggagaatcggccagtggatatttggagcgctttgaggactatggtggaaaaggaaatatcttcacataaaaactagaggaaacattctgagaaacttatttgtgatgtgtgcattcctcccacagagttgaacatttcttttgattaagcagttttgaaacactcttttgtggaatctgctagaggatatttggagcgctttgaggcctatggaggaaaaggaaatatcttcacttaaaaactagacagaagcattctgagaaacttctttgtgatgtttgcattcatctcacagggttgaaattttcttttgattgagaagttttgagacactctttttgtagaatctgcctgtggataataggagcgctttggggcatattttggaaaaggaaataccttcacataaatagtagacagaagcattctgagaaacttctttgtgacgtgtgcatatatatcacagagttgaacctttcttttcatttagccttttgaaacactctttttctagaatctgcaagtgaatatttggagcgctttgcggcctatggtggaaaataaatatcttcacataaaaactagacagaagcaatctgagaaactactttgtgatgtgtgcattcatctcacagagttgaacctttcttttgattgagcagttttgaaacactctttttgttgtatatgcaagtggatatttggagcgatttgtggtctatggtggaaaaggaaatatcttcacgtaaaaactagacagaagcactctgagaaacttctttgtgatgtgtgcattcatctcaccaagcggaaccattcttttgatggagctgttttgaaatactctttttgtagaatctgcaagtgaatatttggagtgctttcaggcctgtggtggaaaaggaaatatcttcacataaaaactagacagaagcattcggagaaacttctttttagtgtgtgcattcatctcacagtgttgaaactttcttttgattgagggttttgaaacagtctttttgataaatctgcaagtggatatttggagcgaattgtggcctatggtttaaaaggaaatatcttcacataaaagctagacagaagctttctgagaaacttctttgtgatatgtgcgttcatctcaccgggttgaatctttcctttcatcgagcaatattgaaacacccttttttttgaatctgaaatagatatttggagcgattgtgtcctatggtagtaaaggcaatattttcacagaaaaactagacagaagcattctgcaaaacttcctcgtgatgtgttcatttatctcaccaaattgaaccattcttttccttgagcagatttgatacactctttttgtagaatgtgcaagtgaatatttggaacgctttgatgagtttgacggaaaaggaaataccttcacatataaacgagacagaagcattctgagaaacttctttctgatatgtgcattcaactcacagagttgaacctttcttttgattcagcagttttgaaacacactttttgaaggatctgtaagtggatatttggagtgcttaggggtcgatgctagaaaggaaatatctccacataaaaacttgatggaagcattctgagaaacttctttgtgatgtgtgcattcatcagagagagtttaacatttcttttgactgagcagttttgaaactctctttttgtagaatctgcaagtggacatttggagccacttgaggcctattgtggaaaagggaataaatgcacataaaagctacacggaagcattctgacaaacttctttgtgatgtgcacattcatctcacagattgaaaatttcttttgattgagcagttttgaaatgctcttttcggagaatcagccagtggatatttggagcactttgaggactatggtggaaaaggaaatatcttcacataaaaactagaggaaacattctgagaaacttatttgtgatgtgtgcattcctctcacagagttgaacatttcttttgattaagcagttttgaaacacccttttgtggaatctgctagaggatatttggagcgctttgaggcctatggaggaaaaggaaatatcttcacttaaaaactagacagaagcattctgagaaacttctttgtgatgtttgcattcatctcacagggttgaaattttcttttgattgagaagttttgagacactctttttgtagaatctgcctgtggataataggagcgctttggggcatattttggaaaaggaaataccttcacataaatagtagacagaagcattctgagaaacttctttgtgacgtgtgcatatatatcacagagttgaacctttcttttcatttagccttttgaaacactctttttctagaatctgcaagtgaatatttggagcgctttgcggcctatggtggaaaataaatatcttcacataaaaactagacagaagcaatctgagaaactactttgtgatgtgtgcattcatctcacagagttgaacctttcttttgattgagcagttttgaaacactctttttgttgtatatgcaagtggatatttggagcgatttgtggtctatggtggaaaaggaaatatcttcacgtaaaaactagacagaagcactctgagaaacttctttgtgatgtgtgcattcatctcaccaagcggaaccattcttttgatggagctgttttgaaatactctttttgtagaatctgcaagtgaatatttggagtgctttcaggcctgtggtggaaaaggaaatatcttcacataaaaactagacagaagcattcggagaaacttctttttagtgtgtgcattcatctcacagtgttgaaactttcttttgattgagggttttgaaacagtctttttgataaatctgcaagtggatatttggagcgaattgtggcctatggtttaaaaggaaatatcttcacataaaagctagacagaagctttctgagaaacttctttgtgatatgtgcgttcatctcaccgggttgaatctttcctttcatcgagcaatattgaaacacccttttttttgaatctgaaatagatatttggagcgattgtgtcctatggtagtaaaggcaatattttcacagaaaaactagacagaagcattctgcaaaacttcctcgtgatgtgttcatttatctcaccaaattgaaccattcttttccttgagcagatttgatacactctttttgtagaatgtgcaagtgaatatttggaacgctttgatgagtttgacggaaaaggaaataccttcacatataaacgagacagaagcattctgagaaacttctttctgatatgtgcattcaactcacagagttgaacctttcttttgattcagcagttttgaaacacactttttgaaggatctgtaagtggatatttggagtgcttaggggtcgatgctagaaaggaaatatctccacataaaaacttgatggaagcattctgagaaacttctttgtgatgtgtgcattcatcagagagagtttaacatttcttttgactgagcagttttgaaactctctttttgtagaatctgcaagtggacatttggagccacttgaggcctattgtggaaaagggaataaatgcacataaaagctacacggaagcattctgacaaacttctttgtgatgtgcacattcatctcacagattgaaaatttcttttgattgagcagttttgaaatgctcttttcggagaatcagccagtggatatttggagcactttgaggactatggtggaaaaggaaatatcttcacataaaaactagaggaaacattctgagaaacttatttgtgatgtgtgcattcctctcacagagttgaacatttcttttgattaagcagttttgaaacacccttttgtggaatctgctagaggatatttggagcgctttgaggcctatggaggaaaaggaaatatcttcacttaaaaactagacagaagcattctgagaaacttctttgtgatgtttgcattcatctcacagggttgaaattttcttttgattgagaagttttgagacactctttttgtagaatctgcctgtggataataggagcgctttggggcatattttggaaaaggaaataccttcacataaatagtagacagaagcattctgagaaacttctttgtgacgtgtgcatatatatcacagagttgaacctttcttttcatttagccttttgaaacactctttttctagaatctgcaagtgaatatttggagcgctttgcggcctatggtggaaaataaatatcttcacataaaaactagacagaagcattctgataaacttctttgtaatgtgtgcattcatctcacagagttgaacctttcttttgattgagctgttttgaaacactctttttgaggaatctgcaagtggatatttagagcgctttgaggcgtatggtggaaaatgaaacatcttcacataaaaactagacagcagcactctgagaaacttctttgtgatgtgtgcattcatctcaccaagcggaaccattcttttgatggagctgttttgaaatactctttttgtagaatctgcaagtgaatatttggagtgctttcaggcctgtggtggaaaagggaatatcttcacataaaaactagacagaagcattcggagaaacttctttttagtgtgtgcattcatctcacagtgttgaaactttcttttgattgagggttttgaaacagtctttttgataaatctgcaagtggatatttggagcgaattgtggcctatggtttaaaaggaaatatcttcacataaaagctagacagaagctttctgagaaacttctttgtgatatgtgcgttcatctcaccgggttgaatctttcctttcatcgagcaatattgaaacacccttttttttgaatctgaaatagatatttggagcgattgtgtcctatggtagtaaaggcaatattttcacagaaaaactagacagaagcattctgcaaaacttcctcgtgatgtgttcatttatctcaccaaattgaaccattcttttccttgagcagatttgatacactctttttgtagaatgtgcaagtgaatatttggaacgctttgatgagtttgacggaaaaggaaataccttcacatataaacgagacagaagcattctgagaaacttctttctgatatgtgcattcaactcacagagttgaacctttcttttgattcagcagttttgaaacacactttttgaaggatctgtaagtggatatttggagtgcttaggggtcgatgctagaaaggaaatatctccacataaaaacttgatggaagcattctgagaaacttctttgtgatgtgtgcattcatcagagagagtttaacatttcttttgactgagcagttttgaaactctctttttgtagaatctgcaagtggacatttggagccacttgaggcctattgtggaaaagggaataaatgcacataaaagctacacggaagcattctgacaaacttctttgtgatgtgcacattcatctcacagattgaaaatttcttttgattgagcagttttgaaatgctcttttcggagaatcagccagtggatatttggagcactttgaggactatggtggaaaaggaaatatcttcacataaaaactagaggaaacattctgagaaacttatttgtgatgtgtgcattcctctcacagagttgaacatttcttttgattaagcagttttgaaacacccttttgtggaatctgctagaggatatttggagcgctttgaggcctatggaggaaaaggaaatatcttcacttaaaaactagacagaagcattctgagaaacttctttgtgatgtttgcattcatctcacagggttgaaattttcttttgattgagaagttttgagacactctttttgtagaatctgcctgtggataataggagcgctgtggggcatattttggaaaaggaaataccttcacataaatagtagacagaagcattctgagaaagttctttgtgacgtgtgcatatatatcacagagttgaacctttcttttcatttagccttttgaaacactctttttctagaatctgcaagtgaatatttggagcgctttgcggcctatggtggaaaataaatatcttcacataaaaactagacagaagcaatctgagaaactactttgtgatgtgtgcattcatctcacagaggtgaacctttcttttgattgagcagttttgaaacactctttttgttgtatatgcaagtggatatttggagcgatttgtggtctatggtggaaaaggaaatatcttcacgtaaaaactagacagaagcactctgagaaacttctttgtgatgtgtgcattcatctcaccaagcggaaccattcttttgatggagctgttttgaaatactctttttgtagaatctgcaagtgaatatttggagtgctttcaggcctgtggtggaaaagggaatatcttcacataaaaactagacagaagcattcggagaaacttctttttagtgtgtgcattcatctcacagtgttgaaactttcttttgattgagggttttgaaacagtctttttgataaatctgcaagtggatatttggagcgaattgtggcctatggtttaaaaggaaatatcttcacataaaagctagacagaagctttctgagaaacttctttgtgatatgtgcgttcatctcaccgggttgaatctttcctttcatcgagcaatattgaaacacccttttttttgaatctgaaatagatatttggagcgattgtgtcctatggtagtaaaggcaatattttcacagaaaaactagacagaagcattctgcaaaacttcctcgtgatgtgttcatttatctcaccaaattgaaccattcttttccttgagcagatttgatacactctttttgtagaatgtgcaagtgaatatttggaacgctttgatgagtttgacggaaaaggaaataccttcacatataaacgagacagaagcattctgagaaacttctttctgatatgtgcattcaactcacagagttgaacctttcttttgattcagcagttttgaaacacactttttgaaggatctgtaagtggatatttggagtgcttaggggtcgatgctagaaaggaaatatctccacataaaaacttgatggaagcattctgagaaacttctttgtgatgtgtgcattcatcagagagagtttaacatttcttttgactgagcagttttgaaactctctttttgtagaatctgcaagtggacatttggagccacttgaggcctattgtggaaaagggaataaattcacataaaagctacacggaagcattctgacaaacttctttgtgatgtgcacattcatctcacagattgaaaatttcttttgattgagcagttttgaaatgctcttttcggagaatcagccagtggatatttggagcactttgaggactatggtggaaaaggaaatatcttcacataaaaactagaggaaacattctgagaaacttatttgtgatgtgtgcattcctctcacagagttgaacatttcttttgattaagcagttttgaaacacccttttgtggaatctgctagaggatatttggagcgctttgaggcctatggaggaaaaggaaatatcttcacttaaaaactagacagaagcattctgagaaacttctttgtgatgtttgcattcatctcacagggttgaaattttcttttgattgagaagttttgagacactctttttgtagaatctgcctgtggataataggagcgctttggggcatattttggaaaaggaaataccttcacataaatagtagacagaagcattctgagaaacttctttgtgacgtgtgcatatatatcacagagttgaacctttcttttcatttagccttttgaaacactctttttctagaatctgcaagtgaatatttggagcgctttgcggcctatggtggaaaataaatatcttcacataaaaactagacagaagcaatctgagaaactactttgtgatgtgtgcattcatctcacagagttgaacctttcttttgattgagcagttttgaaacactctttttgttgtatatgcaagtggatatttggagcgatttgtggtctatggtggaaaaggaaatatcttcacgtaaaaactagacagaagcactctgagaaacttctttgtgatgtgtgcattcatctcaccaagcggaaccattcttttgatggagctgttttgaaatactctttttgtagaatctgcaagtgaatatttggagtgctttcaggcctgtggtggaaaaggaaatatcttcacataaaaactagacagaagcactctgagaaacttctttgtgatgtgtgcattcatctcacagtgttgaaactttcttttgattgagggttttgaaacagtctttttgatgaatctgcaagtggatatttggagcgaattgtggcctatggtgtaaaaggaaatatcttcacataaaaactagacagaagccttctgagaaacttctttgtgatgtgtgcgttcatctcaccaggttgaatctttcctttcatcgagcagtattgaaacaccctttttgtagaatctgaaagtagatatttggagcgattgtgtcctatggtagtaaaggcaatattttcacagaaaaactagacagaagcattctgcgaaacttcctcatgatgtgttcatttatctcaccaaattgaaccattcttttcactgagcagatttgatacactctttttgtagaatgtgcaagtgaatatttggaacgctttgatgagtatgatggaaaaggaaataccttcacatataaactagatagaagcattctgagaaacttttctctgatatgtgcattcaactcacagagttgaacctttcttttgattcagcagttttgaaacacgctttttgaagaatctataagtggatatttggagtgcttaggggccgatggcggaaaaggaaatatctccacataaaaactagatggaagcattctgagaaacttctttgtgatgtgtgcattcatcagagagagtttaacatttcttttgactgagcagttttgaaactctctttttgtagaatctgcaagtggacatttggagccacttgaggcctattgtggaaaagggaataaatgcacataaaagctacacggaagcattctgagaaacttctttgtgatgtgcacattcatctcacagatttgaaaatttcttttgattgagcagttttgaaatgctctttttggagaattggccagtggatatttggagcgctttgaggactatggtggaaaaggaaatatcttcacataaaaactagaggaaacattctgagaaacttatttgtgatgtgtgcattcctctcacagagttgaacatttcttttgattaagcagttttgaaacactctttttgtagaatctgctagaggatatttggagcactttgacgcctatggaggaaaaggaaatatcttcacttaaaaactagacagaagcattctgagaaacttctttgtgatgtttgcattcatctcacagggttgaaattttcttttgattgagaagttttgagacactctttttgtagaatctgcctgtggataataggagcgctttggggcatattttggaaaaggaaataccttcacataaatagtagacagaagcattctgagaaatttttggcgatctgtgcattcaactcacagatttgaacctttcttttgattgaacagttttgaaacactctttttgtagtatctgtaaatggatatttgaagcggtttgaggtctatcgtggaaaaggaaatatcttcacatataaactagacagaagcattctgagaaacttctctgtgataagtgccttcatctcacagagttgaacctttcttttgattgagcagtttttaaacactctttttgttgtatatgcaagtgggtatttgaagcgatttgtggtctctggtggaaaaggaaatatcttcacataaaaactagacagaagcactctgagaaacttctttgtgatgtgtgcattcatctcaccaagcggaaccattcttttgatggagctgttttgaaatactctttttgtagaatctgcaagtgaatatttggagtgctttcaggcctgtggtggaaaaggaaatatcttcacataaaaactagacagaagcattcggagaaacttctttttagtgtgtgcattcatctcacagtgttgaaactttcttttgattgagggttttgaaacagtctttttgataaatctgcaagtggatatttggagcgaattgtggcctatggtttaaaaggaaatatcttcacataaaagctagacagaagctttctgagaaacttctttgtgatatgtgcgttcatctcaccgggttgaatctttcctttcatcgagcaatattgaaacacccttttttttgaatctgaaatagatatttggagcgattgtgtcctatggtagtaaaggcaatattttcacagaaaaactagacagaagcattctgcaaaacttcctcgtgatgtgttcatttatctcaccaaattgaaccattcttttccttgagcagatttgatacactctttttgtagaatgtgcaagtgaatatttggaacgctttgatgagtttgacggaaaaggaaataccttcacatataaacgagacagaagcattctgagaaacttctttctgatatgtgcattcaactcacagagttgaacctttcttttgattcagcagttttgaaacacactttttgaaggatctgtaagtggatatttggagtgcttaggggtcgatgctagaaaggaaatatctccacataaaaacttgatggaagcattctgagaaacttctttgtgatgtgtgcattcatcagagagagtttaacatttcttttgactgagcagttttgaaactctctttttgtagaatctgcaagtggacatttggagccacttgaggcctattgtggaaaagggaataaatgcacataaaagctacacggaagcattctgacaaacttctttgtgatgtgcacattcatctcacagattgaaaatttcttttgattgagcagttttgaaatgctcttttcggagaatcagccagtggatatttggagcactttgaggactatggtggaaaaggaaatatcttcacataaaaactagaggaaacattctgagaaacttatttgtgatgtgtgcattcctctcacagagttgaacatttcttttgattaagcagttttgaaacacccttttgtggaatctgctagaggatatttggagcgctttgaggcctatggaggaaaaggaaatatcttcacttaaaaactagacagaagcattctgagaaacttctttgtgatgtttgcattcatctcacagggttgaaattttcttttgattgagaagttttgagacactctttttgtagaatctgcctgtggataataggagcgctttggggcatattttggaaaaggaaataccttcacataaatagtagacagaagcattctgagaaacttctttgtgacgtgtgcatatatatcacagagttgaacctttcttttcatttagccttttgaaacactctttttctagaatctgcaagtgaatatttggagcgctttgcggcctatggtggaaaataaatatcttcacataaaaactagacagaagcattctgagaaacttttggtggtctgtgcattcaactcacagatttcagcctttcttttgattgaacagttttgaaacactctttttgtaatatctgtaaatggatatttgcagcggtttgaggtctatcttggaaaaggaaatatcttcacatataaactagacagaagcattctgagaaacttctctgtgataagtgccttcatctcacagagttgaacctttcttttgattgagcagttttgaaacactctttttgttgtatatgcaagtgggtatttggagcgatttgtggtctatggtggaaaaggaaatatcttcacataaaaactagaaggaaacactctgagaaacttctttgtgatgtgtgcattcatctcaccaagctgaaccattcttttgatggagctgttttgaaatactctttttgtaggatctgcaagtggatatttggagtgctttcaggcctgtggtggaaaaggaaatatcttcacataaaaactagacagaagtattctgagaaacttctttgtaatgtgtgcattcatctcacagtgttgaaactttcttttgattgagggttttgaaacagtctttttgatgcaactgcaagtggatatttggagcgaattgtggcctatggtttaaaaggaaatatcttcacataaaaactagacagaagccttctgagaaacttctttgtgatgtgtgcgttcatctcactgggttgaatctttcctttcatcgagcagtattgaaacaccctttttgtagaatctgaaagtcgatatttggagcgattgtgtcctatggtagtaaaggaaatattttcacagaaaaactagacagaagcattctgcaaaacttcctcgtgatatgttcacttatctcaccaaattgaaccattgttttcattgagcagatttgatacactctttttgtagcatgtgcaagtgaatatttggaacgctttgatgagtatgacggaaaaggaaataccttcacatataaactagacagaagcattctgagaaacttttctctgatatgtgcattcaactcacagagttgaacctttcttttgattcagcagttttgaaacatgctttttgaagaatctataagtggatatttggagtgcttaggggccgatggcggaaaaggaaatatctccacataaaaactagatggaagcattctgagaaacttctttgtgatgtgtgcattcatcagagagagtttaacatttcttttgactgagcagttttgaaactctctttttgtagaatctgcaagtggacatttggagccacttgaggcctattgtggaaaagggaataaatgcacataaaagctacacggaaagcattctgacaaacttctttgtgatgtgcacattcatctcacagattgaaaatttcttttgattgagcagttttgaaatgctcttttcggagaatcagccagtggatatttggagcactttgaggactatggtggaaaaggaaatatcttcacataaaaactagaggaaacattctgagaaacttatttgtgatgtgtgcattcctctcacagatttgaacatttcttttgattaagcagttttgaaacactctttttgtagaatctgctagaggatatttggagcactttgacgcctatggaggaaaaggaaatatcttcacttaaaaactagacagaagcattctgagaaacttctttgtgatgtttgcattcatctcacagagttgaaattttcttttgattgagcaattttgagacactctttttgtagaatctgcctgtggataataggagtgctttggggcatattttggaaaaggaaataccttcacataaatagtagacaaatctgtctagtttttatgtgaagatagttccttttccacaataggccccaaaacgctccaaatatccccttgcagacactacaaaaagattttttaaaaactgctaaatcttcttgatccagtctatatcacccatgggaaatactatgcagccataaaaaatgatgagttcatatcctttttagggacatggatgaaattggaagtcatcattctcagtaaactatcacaagaacaaaaaaccaaacaccgcatatnnnnnnnnnnnnnnnnnnnnnnnnnnnnnnnnnnnnnnnnnnnnnnnnnnnnnnnnnnnnnnnnnnnnnnnnnnnnnnnnnnnnnnnnnnnnnnnnnnnnagcattctgagaaacttttggtggtctgtgcattcaactcacagatttcagcctttcttttgattgaacagttttgaaacattctttttgtaatatctgtaaatggatatttgaagcggtttgaggtctatcttggaaaaggaaatatcttcacatataaactagacagaagcattctgagaaacttctctgtgataagtgccttcatctcacagagttgaacctttcttttgattgagcagttttgaaacactctttttgttgtatatgcaagtgggtatttggagcgatttgtggtctatggtggaaaaggaaatatcttcacataaaaactagaaggaagcactctgagaaacttctttgtgatgtgtgcattcatctcaccaagcggaaccattcttttgatggagctgttttgaaatactctttttgtagaatctgcaagtgaatatttggagtgctttcaggcctgtggtggaaaaggaaatatcttcacataaaaactagacagaagcattcggagaaacttctttttagtgtgtgcattcatctcacagtgttgaaactttcttttgattgagggttttgaaacagtctttttgataaatctgcaagtggatatttggagcgaattgtggcctatggtttaaaaggaaatatcttcacataaaagctagacagaagccttctgagaaacttctttgtgatgtgtgcgttcatctcactgggttgaatctttcctttcattgagccgtattgaaacaccctttttgtagaatctgaaagtagatatttggagcgattgtgtcctatggtagtaaaggaaatattttcacagaaaaactagacagaagcattctgcaaaacttcctcgtgatgtgttcacttatctcaccaaattgaaccattgttttcattgagcagatttgatacactctttttgtagaatgtgcaagtgaatatttggaacactttgatgagtatgacggaaaaggaaataccttcacatataaactagacagaagcattctgagaaacttctttctgatatgtgcattcaactcacagagttgaacctttcttttgattcagcagttttgaaacacactttttgaaggatctgtaagtggatatttggagtgcttaggggtcgatgctagaaaggaaatatctccacataaaaacttgatggaagcattctgagaaacttctttgtgatgtgtgcattcatcagagagagtttaacatttcttttgactgagcagttttgaaactctctttttgtagaatctgcaagtggacatttggagccacttgaggcctattgtggaaaagggaataaattcacataaaagctacacggaaagcattctgagaaacttctttgtgatgtgcacattcatctcacagatttgaaaatttcttttgattgagcagttttgaaatgctctttttggagaattggccagtggatatttggagcgctttgaggactatggtggaaaaggaaatatcttcacataaaaactagaggaaaacattctgagaaacttatttgtgatgtgtgcattcctctcacagagttgaacatttcttttgattaagcagttttgaaacactctttttgtagaatctgctagaggatatttggagcactttgacgcctatggaggaaaaggaaatatcttcacttaaaaactagacagaagcattctgagaaacttctttgtgatgtttgcattcatctcacagggttgaaattttcttttgattgagaagttttgagacactctttttgtagaatctgcctgtggataataggagcgctttggggcatattttggaaaaggaaataccttcacataaatagtagacagaagcattctgagaaacttctttgtgacgtgtgcatatatatcacagagttgaacctttcttttcatttagccttttgaaacactctttttctagaatctgcaagtgaatatttggagcgctttgcggcctatggtggaaaataaatatcttcacataaaaactagacagaagcaatctgaaaaactactttgtgatgtgtgcattcatctcacagaggtgaacctttcttttgattgagcagttttgaaacactctttttgttgtatatgcaagtggatatttggagcgatttgtggtctatggtggaaaaggaaatatcttcacgtaaaaactagacagaagcactctgagaaacttctttgtgatgtgtgcattcatctcaccaagcggaaccattcttttgatggagctgttttgaaatactctttttgtagaatctgcaagtgaatatttggagtgctttcaggcctgtggtggaaaaggaaatatcttcacataaaaactagacagaagcattcggagaaacttctttttagtgtgtgcattcatctcacagtgttgaaactttcttttgattgagggttttgaaacagtctttttgataaatctgcaagtggatatttggagcgaattgtggcctatggtttaaaaggaaatatcttcacataaaagctagacagaagctttctgagaaacttctttgtgatatgtgcgttcatctcaccgggttgaatctttcctttcatcgagcaatattgaaacacccttttttttgaatctgaaatagatatttggagcgattgtgtcctatggtagtaaaggcaatattttcacagaaaaactagacagaagcattctgcaaaacttcctcgtgatgtgttcatttatctcaccaaattgaaccattcttttccttgagcagatttgatacactctttttgtagaatgtgcaagtgaatatttggaacgctttgatgagtttgacggaaaaggaaataccttcacatataaacgagacagaagcattctgagaaacttctttctgatatgtgcattcaactcacagagttgaacctttcttttgattcagcagttttgaaacacactttttgaaggatctgtaagtggatatttggagtgcttaggggtcgatgctagaaaggaaatatctccacataaaaacttgatggaagcattctgagaaacttctttgtgatgtgtgcattcatcagagagagtttaacatttcttttgactgagcagttttgaaactctctttttgtagaatctgcaagtggacatttggagccacttgaggcctattgtggaaaagggaataaatgcacataaaagctacacggaagcattctgacaaacttctttgtgatgtgcacattcatctcacagattgaaaatttcttttgattgagcagttttgaaatgctcttttcggagaatcagccagtggatatttggagcactttgaggactatggtggaaaaggaaatatcttcacataaaaactagaggaaacattctgagaaacttatttgtgatgtgtgcattcctctcacagagttgaacatttcttttgattaagcagttttgaaacactcttttgtggaatctgctagaggatatttggagcgctttgaggcctatggaggaaaaggaaatatcttcacttaaaaactagacagaagcattctgagaaacttctttgtgatgtttgcattcatctcacagggttgaaattttcttttgattgagaagttttgagacactctttttgtagaatcagcctgtggataataggagcgctttggggcatattttggaaaaggaaataccttcacataaatagtagacagaagcattctgagaaagttctttgtgacgtgtgcatatatatcacagagttgaacctttcttttcatttagccttttgaaacactctttttctagaatctgcaagtgaatatttggagcgctttgcagcctatggtggaaaataaatatcttcacataaaaactagacagaagcattctgagaaacttttggtggtctgtgcattcaactcacagatttcagcctttcttttgattgaacagttttgaaacactctttttgtaatatctgtaaatggatatttgcagcggtttgaggtctatcttggaaaaggaaatatcttcacatataaactagacagaaacactctgagaaacttctttgtgatgtgtgcattcatctcaccaagcttaaccattcttttgaaggagctgttttgaaatactctttttgtagaatctgcaagtggatatttggagtgctttcaggcctgtggtggaaaaggaaatatcttcacataaaaactagacagaagtattctgagaaacttctttgtaatgtgtgcattcatctcacagtgttgaaactttcttttgattgagggttttgaaacagtctttttgatgcaactgcaagtggatatttggagcgaattgtggcctatggtttaaaaggaaatatcttcacataaaaactagacggaaagccttctgagaaacttctttgtgatgtgtgcgttcatctcactgggttgaatctttcctttcatcgagcagtattgaaacaccctttttgtagaatctgaaagtagatatttggagcgattgtgtcctatggtagtaaaggaaatattttcacagaaaaactagacagaagcattctgcaaaacttcctcgtgatgtgttcacttatctcaccaaattgaaccattgttttcattgagcagatttgatacactctttttgtagcatgtgcaagtgaatatttggaacgctttgatgagtatgacggaaaaggaaataccttcacatataaactagacagaagcattctgagaaacttctttctgatatgtgcattcaactcacagagttgaacctttcttttgattcagcagttttgaaacacactttttgaaggatctgtaagtggatatttggagtgcttaggggtcgatgctagaaaggaaatatctccacataaaaacttgatggaagcattctgagaaacttctttgtgatgtgtgcattcatcagagagagtttaacatttcttttgactgagcagttttgaaactctctttttgtagaatctgcaagtggacatttggagccacttgaggcctattgtggaaaagggaataaatgcacataaaagctacacggaagcattctgacaaacttctttgtgatgtgcacattcatctcacagattgaaaatttcttttgattgagcagttttgaaatgctcttttcggagaatcagccagtggatatttggagcactttgaggactatggtggaaaaggaaatatcttcacataaaaactagaggaaacattctgagaaacttatttgtgatgtgtgcattcctctcacagagttgaacatttcttttgattaagcagttttgaaacactcttttgtggaatctgctagaggatatttggagcgctttgaggcctatggaggaaaaggaaatatcttcacttaaaaactagacagaagcattctgagaaacttctttgtgatgtttgcattcatctcacagggttgaaattttcttttgattgagaagttttgagacactctttttgtagaatctgcctgtggataataggagcgctttggggcatattttggaaaaggaaataccttcacataaatagtagacagaagcattctgagaaacttctttgtgacgtgtgcatatatatcacagagttgaacctttcttttcatttagccttttgaaacactctttttctagaatctgcaagtgaatatttggagcgctttgcggcctatggtggaaaataaatatcttcacataaaaactagacagaagcaatctgagaaactactttgtgatgtgtgcattcatctcacagagttgaacctttcttttgattgagcagttttgaaacactctttttgttgtatatgcaagtggatatttggagcgatttgtggtctatggtggaaaaggaaatatcttcacgtaaaaactagacagaagcactctgagaaacttctttgtgatgtgtgcattcatctcaccaagcggaaccattcttttgatggagctgttttgaaatactctttttgtagaatctgcaagtgaatatttggagtgctttcaggcctgtggtggaaaaggaaatatcttcacataaaaactagacagaagcattcggagaaacttctttttagtgtgtgcattcatctcacagtgttgaaactttcttttgattgagggttttgaaacagtctttttgataaatctgcaagtggatatttggagcgaattgtggcctatggtttaaaaggaaatatcttcacataaaagctagacagaagctttctgagaaacttctttgtgatacgtgcgttcatctcaccgggttgaatctttcctttcatcgagcaatattgaaacacccttttctttgaatctgaaatagatatttggagcgattgtgtcctatggtagtaaaggcaatattttcacagaaaaactagacagaagcattctgcaaaacttcctcgtgatgtgttcacttatctcaccaaattgacccattgttttcattgagcagatttgatacactctttttgtagaatgtgcaagtgaatatttggaactctttgatgagtatgacggaaaaggaaataccttcacgtacaaactagacagaagcattctgagaaacttctttctgatatgtgcattcaactcactgagttgaacctttcttttgattcagcagttttgaaacacgctttttgaagaatctgtaagtggctatttggagtgcttaggggccgatggtggaatggaaatatctccacataaaaaacttgacggaagcattctgagaaacttctctgtgatgtgtgcattcatcagagagagtttaacctttcttttgactgagcagttttgaaactctctttttgtagaatctgcaagtggacatttggagccacttgaggcctatagtggaaaagggaatatcttcacataaaagctacacggaagcattctgagaaacttctttgtgatgtacagattcctctcacagatttgaaaatttcttttgattgagcagttttgaaatgttctttttggagaatcggccagtggatatttggagcgctttgaggactatggtggaaaaggaaatatcttcacataaaaactagaggaaacattctgagaaacttatttgtgatgtgtgcattcctctcacagagttgaacatttcttttgattaagcagttttgaaacactctttttgtagaatctgctagaggatatttggagctctttgaggcctatggaggaaaaggaaatatcttcacttaaaaactagacagaagcattctgataaacttctttgtgatgtgtgcattcatctcacagagttgaacctttcttttgattgagctgttttgaaacactctttttgaggaatctgcaagtggatatttagagcgctttgaggcgtatggtggaaaatgaaacatcttcacataaaaactagacagcaacactctgagaaacttctttgtgatgtgtgcattcatctcaccaagttgaaccattcttttgatggagctgttttgaaatactctttttgtaggatctgcaagtggatatttggagtgctttcaggttctgtggtggaaaaggaaatatcttcacataaaaactagacagaagtattctgagaaacttctttgtaatgtgtgcattcatctcacagtgttgaaactttcttttgattgagggttttgaaacagtctttttgatgaaactgcaagtggatatttggagcgaattgtgtcctatggtttaaaaggaaatatcttcacataaaaactagacagaagccttctgagaaacttctttgtgatgtgtgcgttcatctcactgggttgaatctttcttttcatcgagcagtattgaaacaccctttttgtagaatctgaaagtcgatatttggagcgattgtgtcctatggtagtaaaggaaatattttcacagaaaaactagacagaagcattctgcaaaacttcctcgtgttgttttcacttatctcaccaaattgaaccattgttttcattgagcagatttgatacactctttttgtagcatgtgcaagtgaatatttggaacgctttgatgagtatgacggaaaaggaaataccttcacatataaactagacagaagcattctgagaaacttctttctgatatgtgcattcaactcacagagttgaacctttcttttgattcagcagttttgaaacacactttttgaaggatctgtaagtggatatttggagtgcttaggggtcgatgctagaaaggaaatatctccacataaaaacttgatggaagcattctgagaaacttctttgtgatgtgtgcattcatcagagagagtttaacatttcttttgactgagcagttttgaaactctctttttgtagaatctgcaagtggacatttggagccacttgaggcctattgtggaaaagggaataaatgcacataaaagctacacggaagcattctgacaaacttctttgtgatgtgcacattcatctcacagattgaaaatttcttttgattgagcagttttgaaatgctcttttcggagaatcagccagtggatatttggagcactttgaggactatggtggaaaaggaaatatcttcacataaaaactagaggaaacattctgagaaacttatttgtgatgtgtgcattcctctcacagagttgaacatttcttttgattaagcagttttgaaacacccttttgtggaatctgctagaggatatttggagcgctttgaggcctatggaggaaaaggaaatatcttcacttaaaaactagacagaagcattctgagaaacttctttgtgatgtttgcattcatctcacagggttgaaattttcttttgattgagaagttttgagacactctttttgtagaatctgcctgtggataataggagcgctttggggcatattttggaaaaggaaataccttcacataaatagtagacagaagcattctgagaaacttctttgtgacgtgtgcatatatatcacagagttgaacctttcttttcatttagccttttgaaacactctttttctagaatctgcaagtgaatatttggagcgctttgcggcctatggtggaaaataaatatcttcacataaaaactagacagaagcaatctgagaaactactttgtgatgtgtgcattcatctcacagagttgaacctttcttttgattgagcagttttgaaacactctttttgttgtatatgcaagtggatatttggagcgatttgtggtctatggtggaaaaggaaatatcttcacgtaaaaactagacagaaacactctgagaaacttctttgtgatgtgtgcattcatctcaccaagttgaaccattcttttgatggagctgttttgaaatactctttttgtaggatctgcaagtggatatttggagtgctttcaggtctgtggtggaaaaggaaatatcttcacataaaaactagacagaagtattctgagaaacttctttgtaatgtgtgcattcatctcacagtgttgaaactttcttttgattgagggttttgaaacagtctttttgatacaactgcaagtggatatttggagcgaattgtggcctatggtttaaaaggaaatatcttcacataaaaactagacagannnnnnnnnnnnnnnnnnnnnnnnnnnnnnnnnnnnnnnnnnnnnnnnnnnnnnnnnnnnnnnnnnnnnnnnnnnnnnnnnnnnnnnnnnnnnnnnnnnntgatcttcacataaaaactagatagaagatttctgagaaacttttttgtgatatgtgcattcatctcacagagtttaaccattcttttgattgagaggtttggtaacagtctttttgtagaatctacaaaaggatatttgtgagcactttgaaacctgaggtgaaaaaggaaaaatcttcacagaaaaactagaaagatggtttctgagaaagtgctctgtgatgtttgaattcatctcacagacttgaacctttctattgatttagcatattggtaacagtctttttgtagaatctgcaaagggatatttgggtacacttggaggccaatggtgagaaaggaaatatcttcacatgaatactagacagaagctttctgagacacttctgttttatgtgtgcattcctttcaaacagttgaaacattcttttgattgagcagtttggaaacagtctttttgaagaatcagcaaagggatatttgtgagcgctttgagtcctatggggaaaaaggaaatattttcacataaaaactatacagaatgtttctgagaaactgctttgttatgtgtgcattcatctcacagaggtaaatgtttcttttcattgagtagatgggaaactcttttcttgtagaatctgcaaagggatatttgtgagcgctttgaggcttatggtgaaaaagaaaatatcttcatataaaatgtacacagaagctttctgaggaacttatttgtgatttatgcattcatctcatagagttgaaccattcttttttttggagctctgggtttatgttttaattatttacttttattattattataatttaagttttagggaacgtgtacaacgtgcaggattgttacatatgtatacatgtgccatgtttgtgtgttgctcccatgaactcatcatttagcattaggtatatttcctaatgctatccctccccctccccctcctcccacccgactacaatccctgttgtgtggtgtgtggtgtgtgatgtttcccttcctgtgtccatgtgttctctttgatcaattcccaactatgagtgagaacatgtggtgttttattttttatccttgtgatagttcgctgagaatgatggtttccagcttcatccatgtccctacaaaggacatgaactcatcattttttatggccgcatagtgttccatgatgtatatgtgccacattttcttcatccagtctatcgttgttggacatttacgttggttccaagtctttgctattgtgaatagtgccgctataaacatacgtgtgcatgtgtctttatggcagcatgatttataatcctttgggtatatatacccagtaatgggatggctgggtcaagtggtatttctagttctagatccctgaggaatcgccataccgacttccacaatggttgaactagtttacagtcccaccaacagtgcaaaagtgttcctatttctcacatcctctccagcacctgttgtttcctgactttttaatgattgccattctaactggtgtgagatggtatctcattgtgattttgacttgcatttctctgatggccagtgaagatgagcattttttcatttgttcattggctgcgtaaatgtcttcttttgagaaatgtctgttcatatccttcgcccactttttgatggggttgtttgttttttttcctgtaaatttgcctgagttcattgtagattctgaatattagccatttgtcagatgagtaggtttcaaaatttttctcccattctataggattcctgttcactctgatggtggtttttttgctgtgcagaagctccttagtttaatgagaaacaatttgtcaattgtggcttttgttaccattgctttaggtgttttagatatgaagaccttgcccatgcctatgtcctgaatgttgttgcctaggttttcttctagagattttatgtgatgccttcttttgattaatcagtttgcatactctgttgttgtagaatctgcaaggagatatttgtgagtgctttgaggcctttggtgaaaaaggaaataccttcacataataaatagacagaagttctctgagaaacctccctgtcatgtgtgcattcatctcacagagttgaaacagtcttttgactgaacagtttgaaaactgccgatttgtagaaactgcaatgggatatttgtgagccctttgaggcctatggtgagaaaggaaatatcttcacataaaaactagacagaagatttctgagaaacctctttgtgatgtgtgcattcatctcacagagttgaaccattctcttaattgagcagtttgtaaacagactttttgtagaatctgaaaagggatatttttcagctctaggaggcctatggtgaaaaaggaaacatcttcaataaaaactataaagaatgtttctgagaagctgttttgcaaggtgtgcactcgtctcagagagataaaagtttctattccttgatgagtctggaaactctgttcttgtaaaatctgcaaagggatatttgtgagtggcttgaggcctatggtaaaaaaggaaacgtcttcacataaaaactacacagaagatttcagagaaacttctttgtgatatatgcattcatttcacagagttgaaccattcttttgattgagaagtttggaaacagtcttttctgagaatctgcaaagggatattttgagctctttggtaggcatggtgaaaagggaaatatcgtcacataaaaagtggacagaagcttttggagaaacttctttgtgatgtgtgcattcatctcacagatttgaacctttcttttgattgagcagtttgaaaagagtccttttctagaatctgcagagggatatttgtgagccctttatggcctaaggtgaagtaggaaatatcttcacataaaaattagacagaagcattctgagaaacttcttcatgaagtgtgctttcatttcacagagttgaacctctcttttgattgaggagtttggaaagagactttttgtacaatatgcaaatggatatttggagcactttgacgcctatggtgaaaaaggaaatatcttcacctaaaaactagacagaagcattctgagaaacttctttgtgatgtatgcattcatctcacagagttgaaactttcttctgattgagcagtttcaaaacagaccttttttagattctgcaaagggatatttgtgagcccattgaggcctatggtgaaataggaaatatcttcacataaaaactagtcagaagatttctgagaaacttatttgtgatgtgtgcttttatctcacagagttgaacgtttcttttgattgagcagtttggaaacacactttttgtagaatctgcaaatggatatttggagcactttgaggactatggtgaaaaaggaaatatcttcacataaaaactagaaagcaacattctatgaaacttctttgtgatgtgtgctttcatctcacagagttgaacccttctattcattgaacagtttggaaacgatctttttgtagcatctgcaaatggatatttggagtggttgtaggccttggtgagaaaggaaatatcttcacgtaaaaactagacagaaggattctgagaaactcctttgtgacatgtgcatttataacacagagttgatcccttcttttgattaaacagtttggtaacagtctctttgtagtatctgtagagggatgtttgcgagcagtttgaggcctacggtgaacaaagaaatatcttcacataaaaactagacagaagtattctgagaaacatctttgtcttgtgtcgattcatctcacagagttgaacctttctttggattgagcagcttggaaacaatccttttgtagaatctgcaaaggtatatttctgagaccattgaggcctatggtgaaatatgaaatatcttcccataaaaactagacagaaggtttctaagaaacgttttgtggtgtgtgcttccatctcacagagttgaacctttcttttgattgagaagtttggaaaccatctttttggagaatctgcaaatggatatttggagtgctttgaggcccatggtagaaagggaaatatcattacataaaaattcgatggaagcattctgagaaacttctttgtgaggttttcattcatctcacacagttgaacatttatttgattgaagatttggaaacagtctttttgtaaaatctacaaagggataattgtgaaccctttgaggcctatggtgaagtaggaaatatcttcacataaaaactacacagaaactttctgagaaacttttttctgatgcgtgcattcatctaacagagttgaacctttcctttgctagagcagtttggaaacagtcctattgtagaatccccaaagggatatttctcagccgattgaggtctttggtgatataggaaataccttcacataaaagctagacagaagctttttgagaaacttatatttaatgagtgctttcatctcaaagagttaagcatttcttttgactgagcagtttggaaacactctttttgcagaatctgcaaatggataatttgagcgttttgaggcctatggtgaaaaaggaaatatcttcacataaaaactaaacagaagctttctgagaaactactttgtaatgagtgcattcatctcacagtgtcgaaaccttcttttgattgggcagtttgtaaacagtctttttgtagaatctgcaaatggatatttggagtgctttgagttctatggtgaaaaaggaaatatcttcataaaaaaaccagaaagaaacattctgagaaacttctttgtgatatgtgctttcatctcacagagttgaacctttcttttcattgagcagtttcgaaacagattttttatagaatctggaaatgcatatttggagggctttgaagcctgcggtgaaaaaggaaatatcttcagataaacactaaacagaagctttctgagaaacttctttgtgatgcatgcattcatatcacagagctgaaactttcttttgatttagcattttgtaaacagtcctttggtagaatctgcaaatggatacttcgagcatgttgaggcctatggtgaaaaaggaaatatcttcacaaaaaaactagaaagatacattctaggaaacttctttgtgatgtgtgctttcacctcacagagttgaaacttcctttttattgagcaatttcgacacagtctttttgtggaatctgcaaatggatatttggagcactttgaggcctatggtgaaaaaggaaatatctcacatgaaccctagacagaagtattctgagaaacttctttgtcttgtgtccattcatctcacagagttgaacctttctttggattgagcagtttggaaacagtctttttgtagaatctaaactagacagaagcattctgagaaacttctttgtgatgtgtgctttcaacacacagagttgtacctttcttttgattgagcaatttggaaagagtctttttgtggaatcagcaaatggatgtttggagcactttgaggcctatggtgaaaaaggaaataccttcacataaaaaatagacagaagcattgggagaaacatctcgtgatgtgtgaattcatttcatacagttgaatccttctttgattgaggagtttggaaacagtctttttatggaatcagcaaatggatgtttggaacactttgaagcctatggtgagaaaggaaataccttcacatataaaatagacagaaggattttgagagaacatctatgtgatgtgtgcattcatctcatagagttgaacctttctttgattgagccgtttggaaacagtccttttgtggaatctgcaaagggatatttctgagcccattgaagcctagggtgaaaaagaaatgtcttcacataaaaactagacaaaagcattctgataaactattttgtgatgtgtccattcatctcacagagttgaaactttctttggattgagcagtttggaaacagtctttttgtagaatttgcaaaaaatatttgttagcgctatatggcccatggtgaaataggaaataccttcacataaaaactagacagaagctttctgagaaacttctttctgatgtttgcttccgtgtcacagggttgaacctttcttttgattgagcagtttggaaacactctttttgtagaatctacaaatgggtattttgagtgctttgaggcctatggtgaaaaaagaaatatcttcacagaaaaactagacatatgtattctgcaaaacttctttgtgatgtgtctattaatctcacagagttgaatctttctttggattcagcagttttctaaacagtccttttgtagaatctgcaaagggatatttctgagcccactgagtcctatgctgaaaaaggaaatatcttcacataaaaacctaaaaaccagacagaagcattctgagaaacctctttctgatgtgtgcattcatctcacacagttgaacctttctgtagtttgaacagtttggaaacagtcttttttttttgaatatgcaaatggatatttgtgaaccctttacagcctatggtgaaataggaaatatcttcacataaaaaccagacagaagcattctgaaaaacttctttgtgatgtgtgtactcatctcacagagttgaacatttctttggatgcagcagtttggaaacagtctttttgcagtatctgcagagggatattcatgagcagtttaaggcctatggttaaaaaggatatatcttcacagaaaacctcggcagatccattgtgagaaacttctttgaaatgtgtgcattcatctcacagatttgaacctttctttggattgagcagttttcaaaacagaccttttgcagaatctacaaagggatacttctgagcccattgaggcctatggtgaaaaaggatatatcttcacatgaaatcttaacagaagctttctgagagacttctttggatgtgtgcattcatctcacagtgttgaaactttcttttgattgagcagttttgaaacagtctttttgtacaatctgcaaagggatacttctgagccatttgaggcttattgtgagagaagtatcttcatataaaaactagacaaaagcattctaagaaacttctttgtaatgtgtgaattcatcacacagagttgaaactttcttttgattgagcagtttggagacagtctttttgtataatatgcaaaaggatatttgtgagccctttcaggcctatggtgaaatagggaatatcttcacaaaactaacttgacagaagctttctgagaaaattctttgtgatgtgtaccttcatctcacagagttgaacttttcttttgattgagcagtttagaaacagtctttttgtcgaatctgaagatggatatttgcagtgtttcaggtctatggtgaacaggaaatttctttacataaaaactagacagaagtattctgagaaacttctttgtgatgtatgcattcatgtcacagagttgaaactttccttggattgagcagtttggaaagagtccttttgtagaatctgcaaagggatgtttgtgagcacattggagcctatggtgaaataggaaatgtcttcacataaaaactagacagaagaacaagagccaagatggccgaacaggaacagctccggtctacagctcccagcctgagtgacacagaagacagatgatttctgcatttccatctgaggtaccgggttcatctcactagggagtgccagacagtgggcgcaggtcagtgggtgcatgcaccgtgcacgagcacaagcagggtgaggcattgcctcactcgagaagcacaaggggtcagggagttccctttcctaatcaaagaaaggggtgacggatggcacctggaaaatcgggtcacacccacccaaatactgcgcttttccgatgggcttaaaaaacggtgcaccactagattatatcccacacctggctcggagggtcctaccacacggagtctcactgattgctagcatagcagtctgagatcaaactgcaaggaggcagcgatgctggtggaggggcgtgcaccattgcccatgcttgcttaggtaaacaaagcagccaggaagctggaactgggtggagcccaccacagctcaaggaggcctgcctgcctctgtaggctccacctttggggcagggcacagacaaacaaaaagacagcagtaacctctgcagacttaaatgtctctgtctgacagctttgaacagagccgtggttctcccagtacacaggtggagatctgagaactggcagactgcctcctcaaatgggtccctgcaccctgacccctgaacagcctaactgggaggcaccgtccagcaggggcacactgacacctcacactgcagggtactccaacagacctgcagctgagggtcctgtctgttagaaggaaaactaacaaacagaaaggacatccacaccaaaaacccaactgtacatcaccatcatcaaagaccaaaagtagataaaaccacaaagatggggaaaaaacagaacagaaaaaatggaaactctagaaatcagagcgcctctcctcctccaaaggaaggcagctcctcaccaccaacggaacaaagctggtcggagaatgactttgacgagctgagagaagaaggcttcagatgatcaaattaatctgagctatgggaggacattcaaaccaaaggcaaagaagatgaaaactttgaaaaaatttagaagaatgtataactggaataaccaatacagagaagtgcttaaaggagctgatggagctgaaaaccaaggctcaagatctaagtgaagaatgcagaagcctcaggagccgatgcaatcaactggaagaaaggatatcagcgatggaagatgaaatgaatgaaatgaagtgagaaggagagtttagaggataaagaataaaaagaaatgagcaaagcctacaagaaatatgggactatgtgaaaagaccaaatctacgtctgattggtgtacctgaaagtgatggggagaatggaaccaagttggaaaacactctacaggatattatccaggagaatttccccaatctagcaaggcaggccaacgttcagattcaggaaatacagagaacaccgaaaagatactcctcgagaatagcaactccaagacacataattgtcagattcaccaaagttgaaatgaaggaaaaaatgttaagggcagccagagagaaaggtcgggttacactgaaagggaagcccatcagactaacagcagatctctcagcagaaaccctacaagccagaagagagtgggggccaatatacaacattcttaaagaaaagaattttcaatccagaatttcatatccagccaaactaagcttcataagtgaaggagaaataaaatactttacagagaagcaaatgctgagagattttgtcacaccaggcctgccctaaaagagctcctgaaggaagcgctaaacatggaaaggaacaaccagtaccagccactgcaaaatcaagccaaaatgtaaagaccattgagactaggaagaaactgcatcaactaacgagcaaaataaccagctaacatcataatgacaggatcaaattcacatataacactattaactttaaatgtaaatggactaaatgctccagttaaaagacatagactggcaaatttataaagagtcaagacccatcagtgtgctgtattcaggaaacccatctcacttgcagagacacaaataggctcaaaataaaaggatggaggaagatctaccaagcaaatggaaaacaaaaaaaaaggcaggggttgcaatcctagtctctgataaaacagactttaagccaacaaagatcaaaagagacaaagaaggccattacataatggtaaagggatcaattccacaagaagagctaactatcctaaatatatatgcacccaatacaggagcaccaagattcataaagcaagtcctgagtgacctacaaagagacttagactcccacacattaataatgggggactttaacaccccactgtcaacattagacagatcaatgagacagaaagtcaacaaggatacccaggaattgaactcagctctgcaccaagtggacctaatagacatctacagaactctccatcccaaatcaacagaatatatatttttttcaggaacacaccacacctattccaaaattgaccacataattggaagtaaagctctcctcagcaaatgtaaaagaatagaaattataacaaactatctctcagaccacagagcaatcaaactagaactcaggattaagagtctcactcaaaaccgctcaactacatggaaactgaacaacctgctcctgaatgactactgggtgcataacaaaattaaggcagaaataaagatgttctttgaaaccaacgagaacaaaggcacaacataccagaatctctgggacgcattcaaagcagtgtgtagagggaaatttatagcactgctggttttttgaaaggatcaacaaaattgatagactgctagcaagactaataaagaaaaaaagagagaagaatcaaatagatgcaataaaaaatgataaaggggatatcaccaccaatcccacagaaatacaaactatcatcagagaatactacaaacccttctatgcaaataaactagaaaatctagaagaaatggatacattccttgacacatagactctcccaagactaaaccaggaagaagataaatctctgaatagaccaataacaggatctgaaattgtggcaatattcaatatcttaccaaccaaaaagagtccaggaccagatggattcacagcctaattctagtagaggtacaaggaggaactggtaccattccttctgaaactattccatgaatagaagaagagggaatcctccctaactcattttatgaggccagcatcatcctgataccaaagccgggtagagactcaacccaaaaaagagaattttagaccaaaatctttgatgaacattgatgcaataatcctcaataaaatactggcaaaccgaatccagcagcacatcaaagagctgatccaccatgatcaagggggcttcatccctgggatgcaaggctgtttcaatatatgcaaatcaataaatgtaatccagcatataaacagagccaaagacaaaaaccatatgatcatctcaatagatgcagaaaaggcctttgacaaaattcaacaatccttcattctaaaaactctcaataaattaggtattgatggatcatatttcaaaataatgagagctatctatgacaaacccacagccaatatcatactgaatgggcaaaaactggaagcattcactttgaaaactggcacaagacagggatgccctctctcaccactcctattcaacatagtgttggaatttctggccagggcaattaggcaggagaaggaaataaagggtattcaattaagaaaagaggaagtcaaattgtccctgtttgcagatgacgtgattgtatatctagaaaaccccattgtctcagccgaaaatctccttaagctgataagcaacttcagcaaagtctcaggatacaaaatcattgtgcaaaaatcacaagcattcctatacaccaacaacagacagagagtcaaatcatgagtgaactcccattcacaattgcttcaaagagaataaaatacctaggaattcaacttacaagggatgtgaaggacctcttcaaggagaactacaaaccgctgctcaaggaaataaaagaggatacaaacaaatggaagaacattccatgctcatgggtaggaagaatcaatatcgtgaaaatggccatactgcccaaggtaatttacagattcaatgccatccccatcaagctaccaatgcctttcttcacagcattggaaaaaactactttaaatttcatatggaaccaaaaaagagcccacatcgccaagtcaatcctaagccaaaagagcaaagctggaggcatcacactacctgacttcaaactacactacaaggttacagtaaccaaaacagcatggtacttgtaccacaacagagatatagatcaatggaacagaacagagccctcagaaataatgccgtgtatctacaactatctgatctttgacaaacctgagaaaaacaagcaatggggaaagtattccctatttaataaatggtgctgggaaaattggctagccatatgtagaaagctgaaactggatcccttccttacaccttatacaaaaattaattcaagacggattaaagacttaaactttggacctaaagccataaaaaccctagaagaaaacctaggcattaccattcaggacataggcatgggcaaggacttcatgtctaaaacaccaaaagcaatggcagcaaaagccaaaattgacaaagggatctaatgaaactaaagagcttctgcacagcaaaagaaactaccatcagagtgaacagacaacctacaaaatgggagaaaatttttgcaacctactcatctgacaaagggctaatatccagaatctacaataaactcaaacaaatttacaagaaaaaaacaaacaaccccatcaaaaagtgggagaaggatatgaaaagacacttctcaaaagaagacatttatgcagccaaaaaacacatgaaaaaatgctcaccatcactggccatcagagaaatgcaaatcaaaaccacaatgatataccatctcacaccagttagaatggcgatcattgaaaagtcaggaaacaacaggtgctggagaggatgtggaaaaataggaatacttttacactgttggtgggactgtaaactagttcaaccattgtggaagtcagtgtggcgattcctcagggatctagaactagaaataccatttgacccagccatcccattactgggtatatacccaaaggaccataaatcatgctgctataaagacacattcacacgtatgtttattgcggcattattcacattagcaaagacttggaaccaacccaaatgtccaacaatgatagactggattaagaaaatgtggcacatatacaccatggaatactatgcagccataaaaaatgatgagttcatgtcctttgtagggacatagatgaaattggaaatcatcattctcagtaaactatctcaagaacaaaaaaccaaacaccacgtattctcagttataggagggaattgaacaatgagaacacatggacacaggaaggggaacatcacactctggggactgttgtggggtagggggagggggtgatatagcatttggagatatacctaatgctagatgacgagttagtgggtgccgcacaccagcatggcacatgtatacgtatgtaaataacctgcacaatgtgcacatgtaccctaaaacttaaagtataataataaataaataaataaataaataaatagacagaagctttcggtaaatcttctttgtgctgtgtgctttcacctcacagagttgaacctctcttttgattgggcagtttggaaacactctttttgtagaacttgcaaacggatatttggagtgctttgaggcctatggtgaaaaagaaaatatctgcaaattaaaacttgatggaaactttctgagaaacttctttgtgatgtgtgctttcatctcacagagttggaccttgttttcattgagcagtttggaaacaagtcattttgtagaatctgcaaagggatatatgtgggtggtttgaagcctatagtgaaaaagtaaatatcttcacctaaaacctagacagaagcattttgagaaaactctttgtgatgtttgcattcatctcactgagttgaaactttctattcattgagtagtgtggaatcatactttttgtgcaatctgcaaagaaatatttgtttgcggtttgagacctatggtgaaaaagtaatatcttcacataaaaactagacagaagcattctgagaaactaattttttaatgtgtgcattgatctcacagagttgaacctttcttttgatgaggcagtttggaaacagttttttgtagaatctgaaaagggatattttttatctctttgaggcctaaggtgaagtaggaaatatcttcacataaaaactagaaagatactttctgagaaacttctttgtgacgtgggctttcatctcacagatctgaacctttattttgattgagcagtttggaaagagtcttttttagtatctgcagtgggctattagtgagtggactgaggcctatggtgaaaaaggaaatggcttctcaaaaaaagtatacagaatcattctgagagacttctttgtaatgtgtgcattcatcttacagtgttaaacctttcttttgattgagctttttggaaacactctttttgtagcatctgcaagagtatacttctgagcccattgagacctattgaaatatgaaatatcttcacataaaaactagatagaaggtttctaagaaactcctttgtgaagtgtgctttagtctcacagaattgaaactttcttgtgattaagcagtttgaaaacactctttttgtagattctgcaggtggatatttggagcgctttgaggcccatgatgaaaaaagaaatatcttcacataaaaactaaacagaagttttctgagaaacttctttgtgatgtgtgcattcatcacacagagttgaaccgttcttttgattgagcaatttggaaaaagtcttttcatagaatctgcaaatggatatttggagcactttgaggcctatggtgaaaaacgaaacttcttcacataaaacaagacaaaagcattctgagaaacttctttgtgatgtgtgacaaagtttaacctttcttttcattgaacagtttgcaagcagtctttttggagtatctgcaaagggatatttgttagcggtttgtggcctatggtgaaaaaggaaataccttcacataaaaaccagacagaagctttttgagaaacctctttgtgatgtttgcattcatttcacagagtcgaatcttcctttttcattgagcagtttggaaacagtctttttgcacaatctgtaaaaggatatttctgagtggtttgaggcctgtggtgaaaaagaaatatcttcatataaaaattagacagaagcattctgggaaacttctttgtgatgtgtgcattcaacccacagagttgaagctttcatttcattgagtagttcagaaacagtcttttcatagaatctgcaaagggatatttctgagtcctttgaggcctatggtgaaataggaaatatcttcacataaaaactagacagaagctttctgagaaacttctttgtgatgcgtgctttcatctcacagagttgaaccctttttttgatggagcagtttggatacagtcattttgtagagtctgcaaagggatatttctgagtcctttgagtactatagtgaaatagggaatattttcacataataactagacagaagcattctgagaaacttccttgtgttgtgtgctttcatttcacagagttgaaactttcctttgattgagcagtttgaaacactctttttgtagaacctgtagacacatatttggagcactttgaggcataaggagaaaaaggaagtatctgcacacaataactagatagaaactttctgagaaacttcttcatgatgcgtgctttcatctcacagattcaaactttcttttcattgagcagtttgggaacaagtcattttgtataatctgcaaaggtatatttgtgagctgtttgaggcctattgtgaaaaactaaatatcttcacatgaaaaccaggcagaagctttttgagataactctttgtgatatttgcattcatctcaaagagttgaacctttctgttcattgaggagtttggaaacgttctttttgtgcaaactgaaaaggaatatttctgagtggtttgaggcctatggtgaaaaagaaataacttcacataaaaactagacataagcattctgagaaatttcttttttatctgtgcattcacctcacagagttgaaactttcttttcattgagcagttcagaaacagtctttttgtagaatctgcaaagggatatttttgatcccattgaggcctatggtgaaataggaaatatcttcacataaatactagacagagctttctgagaaacttgtttgtgatgtgtgctttcatcctacagagttgaacccttctgttgattgatcactttggaaacagtctttggaagaatctacaaatggatatttggagagctttgactcctatgtttaaaaaggaaatatattcacataaaaactagacagaagcattttgagaaacctctttgtgatgcatgctttcatttcacagagttgaatcattcttttgactgagcagcttggaaacagtctttttgtacaatctgcaaagggatatttctgagccaattgaggcctatggtgaaaatgaaatatctgcacataaaaactagacagaagcattctgagaaacttctttgtgatgtgtccattcacgtcacagagttgaacctttcttttgattgagcagtttggaaacagtcgttttgtagaatctgcaaagggatatttgtgagccctttatggcctgtggtgaaatacgaaatatcttcacataaaaactagacagaagatttctgagaaacttctttgtgatgtgtgccttcatctcacagtgttgaacctttcttttgattgagcagtttggaaagtcttttagtagaatctgcaaatggatatttggagatatttgaggcccgtggtgaaaaagggagtatcttcacataaaaactagacagaagatttctgaaaaacttctttgtgatgtgtgaattcatgtcacataattcaacctttctttccgttgagcagtttggaaacagtcttttgtagaagctgcagagggaaatttcttagctgtttgaggcctatggtgaaaaagaaatatcttcacataaaaactagacagaagctttctgagaaacttctttgtgatgtgtccattcatctcacagagttaaacctttcttttgattgaggagtttggaaaatgtcttttcttagaatctgcaaagggatatttgtgagccatttatggccttcgttgaaatgtgaaatatcttcacataaaaagtagacagaagctttctgacaaagttctttgtgatgtgcacgtttgtctcacagaattgaacctttcttttgattgagcagtttggaatcaatctttttgtagaatctgtgaatgtataagagagttttaaggcctagagtgaaaaaggaaatatcttcacataaaaacaacacagtagctttttgagaaaactctttgggaaatttccattcatctctaatagttgaccatttcttttcattgagcagtttggaaacagtctttttctacaaactgcaaagggatatttctgagcggtttggggccaatggtgaaaaataaatattttcacatgaaaactagacagaagcattatgagaaacttctttgtgatgtgtgtattcatctcacagagttgaatctttcttttggtttagcaatttggagaaagtctcttgatagtataagtggagttatatttgtgagcggtttaaggcctatggtgcaaaattaaataccttcgcataaaatgtagacagaagctttctgagaaacttctttgtgatgtgtgctttcgtctcacagagttgagcctttcttttgattgaccattttggaaaccatctttttgtagaatctgcaaatgtatatttggagcaatttgtggcctatggtgaaaaaggaaatatcttcacataaaaactagacagaagaattcctagaaacttctttgtgatgtgtgcattcgtctcacaatgttgaaagtttcttttgattgagaagtttgtaaacagaacttttgtaaaatctgcaaagggatatttgtgagccccttgattcctatggcaaaataggaattatcttgagataaaaactagacagaagatttctgagaaacttttttgtgatgtgtgctttcatctcacagagttgaaaatttcttttgattgagcagtttggaaacagtcttttcatataatctgcaaatggatatttggagcactttgtggcctaagttgaaaatggaaatatcttcacataaaaactagacagaagaattctgagaaacttctttctgatgtgtgcattcacctcagagaggtgaacttttcttttgatggagcagtttggaaacagtctttttatagtatctgcagaaggatatttgtgagcggtttaaggcctatggtggaaaaggaaatatcttcacataaaaactagacagaagctttctgagaaacttctttgtgatgtgcgcattcatctcacagtgttgagactttattttatttgagcagtttagagacagtctttttttgcaatctgcaaaggtatatttctgagccatttgaggtctatggtgaaaaagaaatatcttcacattgaaactagacagaagcattctgaggagcttctttgtgatgtctccattcatctgacagagttgaaggtttcttttaattcagcactttggaaaccatatttttgtagaatctgcaaagggatatttttgagacatttgaagcctatagtgaaatagtaaatatcttcacataaaaactagacaggagagttccaagaaacttcattctgatgtgtgcattcacctcacagaatttaacttttcttttgattgagcagtatggaaatggtcgtcttttagaatctggaaagggatatttcttagccctttgaggcctatggtgaaactggaaatatcttcacatgaaaactagaccaaagctttctgagaaacttctttgagatgtatgctttcatctcacagagttaaaactttcttttgattgaggagtttggaaacactctttttgtgaaatctgtaaatggatattaggagtgctttgaggccaatggtgactaagggaatatctgcacataaaaaccaaacagaagttttctgagaaactactttttgatgtgtccattaatctaacagagttaaaactttctttttattgagcagtttggatacagtctttttgtagaatctgaaaaaaatatttgtgagccctttattgcctatggtgaaataggaattttcttcacatataaactagacagaagcattctgaggaacttctttgtgatgtgtgcattcatctcacatagttgaaactttttttggattgagcagtttggaaacagtcattttgtaaaatctgcaaagggatatttctgaacccattgagtactatggtgcaatgtgaaatatcttcacataaaaactagacaaaagctttctaagaaacttctttgtgatgtgtgctttcatctcacagaattgaaactttcttttgattgaggagtttggaaacactctttttctagaatctgcaaatggatatttggagagcttttgaggcccatggtgaaaaacgaaatatcttcacataaaaactaaacagaagctttctgagaaacttccttgtgatgtgtgcattcacctcacagagttgaacctttcttttgattgagcaggttggaaagaggcttattgtacaatccgcaaagggataattctgatccatttgaggcctatggtgaaagagaaatatcttcacataaaaactagacagaatcattacaagaaattttttgtgatgtgtccattcacctcacagagttgaacctttcttttgattgagcagtttggaaacagtctttttgtagaaccttcaaagggatatttgtgagccctttatggtctcaggtgaaataggaaatatcttcacatacaaactagacagaagctgtctgagtaacttttttgttatgtgtgctttcatctcagagaggtaaaaatttgttttgattgatcagtttggaaacagtctttttgtagaatctgcaaatggatgtttggattgctttgagaactatgttgagaaaggtaatatcttcacataaaaacaagacagaagaattctgagaaacttctctgttacgtgcgcattcatctcactggtttgaacatttcttttgattgagcagtttggaaacagtctttttgtacaatctacaaggggatatttttgaacggtttgatgcctatggtgaaaaagaaatatcttcacataaaaactagacagaagcattatgataaactaatttattatgtgtgcatttgtctcacagagttgaacctttcttttcatttagcagttcaaaaactgtctttttttagagtctgcaaagggatatttgtgagacctttgaggcccatggtgatataggaaatatcttcacaaaaaaaatagacagaagcattatgagaaacttcttcatgatgtgtactttcttctcacagatttgagtctttcttttaattgaacagtctggaaactctctttttgtagggtttgcaaaaggatatttggagtgctttgaggcctacggtgaaaaaggaaatattttcacctaaaaactaaacagaagctttctgaaaaacttctctgtgatgtgagtattcatgtcacagtgttgaacctttgttttcattgagcagtttggaaaccatctttttgtataatctgcaaagggatatttctgagcagtttgaggtctacggtgaaaaacaaatatcttaacacaaaaactggacagaggcattctgagaaacttcttattcatgtgtgcattcatctcccagagttgaatctttcttttcattgagaaattcggaaacagtctttttgtagaatttgcaaaagggtatatgtgagcccactgaggcccatggtgaaatgggaaatatcttcacagaaaaactatacagaagcattctgagaaacgtccttgtgatgtttgcattcatctcacagagttgaacctttcttttgattgagccgtttggaaaaactctttttgcagtatctgcaaatggatatttggagtgttttgaggcttgtggtgaaaaactaaatatcttcacataaaatctagtgagagacttcctgaagaacttctttgtgatgtgtgtttcatcttacagagttgaaaatttcttctgatttagcagtttggaaacagtcttttgtagaatctgcaaatcgatatttggattgttttgaggcctatcattagaagagaaatatcttcacataaaaactagacaagatttctgagaaacttctttgtgaagtgtgttttcatctcacagagttgaacagttcttttgattgagcagttaggaaacagtctttatctacaatctgcaaagggatatttctgaggggtttgagtcctatggtgaaaaggaaatatcttcacataaaaactagacagaagcattctgagaaacttctttgtgatgtgtgcattgaacacagagagttgaacctatcttctgatagagcaacttttaaaatctctttttgtaggatctggaagtggacatttggagcgttttgaatcctatggtggaaaaagtaatatcttcacataagaactagacagaagcattctgagaagcttctttgtgatatgtgctttcatctcacaggtttgaacctttcttttgattgagcagtttggaaacagtttttttgtacaatctacaaagggatatttctgagcagtttgatgcctatggtgaaaaagaaatatcttcacataaaaactagaaagaagcattctgagaaacttcttttttatgtgtgcattcgtctcacagagttgaacctttctttgcacggagaactttgaaaacagtctttgtgtagagtctacaaagggatatttgtgagctctttgaggcgtatggtaaaatatgaaatatcttcacataaaaacaagacagaagcattatgaggaacttctttgtgacgtgtggtttcatctcacaaagatgaagatttcctttgannnnnnnnnnnnnnnnnnnnnnnnnnnnnnnnnnnnnnnnnnnnnnnnnnnnnnnnnnnnnnnnnnnnnnnnnnnnnnnnnnnnnnnnnnnnnnnnnnnnnnnnnnnnnnnnnnnnnnnnnnnnnnnnnnnnnnnnnnnnnnnnnnnnnnnnnnnnnnnnnnnnnnnnnnnnnnnnnnnnnnnnnnnnnnnnnnnnnnnnnnnnnnnnnnnnnnnnnnnnnnnnnnnnnnnnnnnnnnnnnnnnnnnnnnnnnnnnnnnnnnnnnnnnnnnnnnnnnnnnnnnnnnnnnnnnnnnnnnnnnnnnnnnnnnnnnnnnnnnnnnnnnnnnnnnnnnnnnnnnnnnnnnnnnnnnnnnnnnnnnnnnnnnnnnnnnnnnnnnnnnnnnnnnnnnnnnnnnnnnnnnnnnnnnnnnnnnnnnnnnnnnnnnnnnnnnnnnnnnnnnnnnnnnnnnnnnnnnnnnnnnnnnnnnnnnnnnnnnnnnnnnnnnnnnnnnnnnnnnnnnnnnnnnnnnnnnnnnnnnnnnnnnnnnnnnnnnnnnnnnnnnnnnnnnnnnnnnnnnnnnnnnnnnnnnnnnnnnnnnnnnnnnnnnnnnnnnnnnnnnnnnnnnnnnnnnnnnnnnnnnnnnnnnnnnnnnnnnnnnnnnnnnnnnnnnnnnnnnnnnnnnnnnnnnnnnnnnnnnnnnnnnnnnnnnnnnnnnnnnnnnnnnnnnnnnnnnnnnnnnnnnnnnnnnnnnnnnnnnnnnnnnnnnnnnnnnnnnnnnnnnnnnnnnnnnnnnnnnnnnnnnnnnnnnnnnnnnnnnnnnnnnnnnnnnnnnnnnnnnnnnnnnnnnnnnnnnnnnnnnnnnnnnnnnnnnnnnnnnnnnnnnnnnnnnnnnnnnnnnnnnnnnnnnnnnnnnnnnnnnnnnnnnnnnnnnnnnnnnnnnnnnnnnnnnnnnnnnnnnnnnnnnnnnnnnnnnnnnnnnnnnnnnnnnnnnnnnnnnnnnnnnnnnnnnnnnnnnnnnnnnnnnnnnnnnnnnnnnnnnnnnnnnnnnnnnnnnnnnnnnnnnnnnnnnnnnnnnnnnnnnnnnnnnnnnnnnnnnnnnnnnnnnnnnnnnnnnnnnnnnnnnnnnnnnnnnnnnnnnnnnnnnnnnnnnnnnnnnnnnnnnnnnnnnnnnnnnnnnnnnnnnnnnnnnnnnnnnnnnnnnnnnnnnnnnnnnnnnnnnnnnnnnnnnnnnnnnnnnnnnnnnnnnnnnnnnnnnnnnnnnnnnnnnnnnnnnnnnnnnnnnnnnnnnnnnnnnnnnnnnnnnnnnnnnnnnnnnnnnnnnnnnnnnnnnnnnnnnnnnnnnnnnnnnnnnnnnnnnnnnnnnnnnnnnnnnnnnnnnnnnnnnnnnnnnnnnnnnnnnnnnnnnnnnnnnnnnnnnnnnnnnnnnnnnnnnnnnnnnnnnnnnnnnnnnnnnnnnnnnnnnnnnnnnnnnnnnnnnnnnnnnnnnnnncagtgggcttcatccctgggatgcaacactggttcaatatatgcaaataaaaaaatgtaatccagcatataaaaagaaccaaagacaaaaaccatatgattatctcaatagatgcagaaaaggcctttacaaaattctacaagccttcaagctaaaaactctcaataaattaggtattgatgggacgtatctcaaaataataagagctatctgtgaaacttctttgtgatgtgtgcattcatctcacagagttgaacctttcttttgattgggtagtttggaaacagtctttttgtagaaactgcaaagtgatatttgtgaacactttgaggcttatggtgaaaaaggaaatatcttcacattaaaattagactcatgttttctgggaaacttctttgtgatgggtgtatgcatctcaaagacttgaatctttcttttgattgagcagtttggaaacagtctttttggacaatctgcaaagggatgtttcggagtggtttgaggcatgtgatgaaaaaggaaatatcttcatataaaaactagacagaagcattctgagaaaccctttgtgatgcatgcattcaactcacagagttgaatattctttcattgagcagattggaaactgtctttttgtagaatatgcaaagtgatatttgtgagctttctgcggcctattgtgaaaaaggaaatatccagaaataaaatctagacagaagccttctgagaaacttcgttgtgatgtgtgcattcatcacacagaattgaacttttcttttgattgagcagttttgaaacagtcttttcatagaatctgcaaaggaaaatttgggaacgctttgaggcttatggtgaaaaagaagtatcttcacctaaaaacttgacagaaacgttctgagaaacttatttttgatgtgtgcattcatctcacacagctgaactttcatttgattgagcagtttggaaacagtccttctgtagaatctgcaaagggttatttatgagcagtttgaggcctatggtgaaaaagggagtatcgacaaataaaaactagacagaaactttctgagaaacttctctgtgatgtctgcattcatctcacagagtagaagctttatttgattgagcagtttggaaacagtctttttgtagaatctgcaaacggttatatataggcggtttcagatctatgatgaaaatggaaatatcttcacataaaaactagacagaagctttctgagaaaattctttgagatgtgcacattcatctcacagatttgaagtgttcttttccttaaccagtttggatagagtctttttgtagaatctgctttgcgatatttgtgagccctttgaagcctatggtgaaaaaagtaatatcttcacacaaaaactagacagaagctttctgagaaacttcgttgtgatgtgtgcattcatcccaaagagttgaacctgtctttggattgagcagtttggaaacagtcctttgtagaatgtacaaagggatatttgagatccctttttggcctatggtgaaaaaggaaatgtcttcagataaaaactagacagaagcattctgacaaacttatttttgatgtgtgcattcttctcacatagttgaacctttctttagatagagcaggttggaaacagtctttttgtagaatctgcaaaatgataatttgaatgctttgaggcttacggtgaaaaaggaaatatcttcacataaaaactagacggaagctttctgagaaacttctttgtgatgtgtgcattcatctcaaagagttgaagctttgtttcagttgagcagtttggtaacagtctttttgtaaaatctgtaaagggacatttgtgagcactttgaggcccatattgaaaaaggaaacatcttcaacatcttcaacatctagtttttactaggtagaagctttctgagaaacttctttgtgatgtgtgcattcacctcacagaggtgaagctttcttgcgattgagtagtttggaaacagtctttttgtagaatctgcaaagggttatttatgggaggtttgaggtctatggtgaaaaagagagtatcagcaaataaaaactagacagaaactttctgagaaacttctctgtgatgtgtgcattcatctcgcagagtggaagttttnnnnnnnnnnnnnnnnnnnnctgtttccaaactgctcaatcaaaagaaactttcaactctgttagatgaatgcacacatcagaaagtagtttctcagcaaacttctcactagtttttatgtgaagatatttcctttttcaacatgggtctcaaagcactcaaaaatatccctttgcagactctagaataacagagtttacaaactgctcaatgaaaagaaatgtttacctctgtgagatgaacacacatatcttaaagcagtttctcagaatgcttctttctagtttttatgtgaagatatttcctttttcaccataggtctcaacttgctcctaaatatccctttgcagattgtacaaaaagactgtttccaaactgctcaatcaaaacaaatgttaaactctatgagataaatgcacacatcacaaaatttttctcagaaaacttttgtctagtttttatgtgaagatatttccttattcacataggcctcaaagtgctacaaatatccctctgcagattctacaaaaagactgtttgcaaactgctcaatccaaagaatgtttcacctctgtgtggtgaatgcacacatccaaagaaatttctcagaaaccttctttatggtttttctgtgaagatatttcctttttcaacataggcctcaaagacctcccaaatatccctttgcagattctacaaaaagactgtttccaaatggctcaataaaaagaattattgaacactgtcagatgaatgcacacagctcaaagaagttttcagaatccttcagtctagtttttatgtgaatatatttcctttttcacgataggcctcaaagtgctccaaatatccatttgcagagtctacaaaaagactgtttccaaacggctcaatcaaaacaaaggttcaactctgtgtgatgaatgcacatgtcacaaagcagtttctcaggatgcttctgtctagtttttcaccataagcctcaaagtgctcacaaatatctctttacagcttctacaaaaatacttcttccaaattgctcaatcaaaagaaaggttcaactctgtgagatgtatgcacaccacaaagaggtttctcagaaagcttctctctagtttttatgtgaagatatttcctttttcaccataggcctctaagcattcacaaatatccctttgcagattctacaaaaagactctttacacattgctcaatcaaaagaatgtttcaacactgtgaagtgaatgctcacatcaccacgatgtttctcagaaagcttctgtgtactttttatgtgaagatatgtcctttttcaccatacacctcaaagggctcacaaatatccctttgcagatcttacaagaaaagagtttccaatcttctcaatgaaaagaaacaggcatatctgggaggtgaatgcacatatcacaaagcagtttctgagaaacattctgtctagtttttatgtgaaggtatctccttttccaccacaggatgcaaagtgctcaaaaatgtccctttgcagattctacaaaaagatagtttccacactgctcatcaaaagaaacgttcaactgtatgagatgaatgcacatgtcaaaaagtagtttctcagaaagcttctattaagtttttatgtgaatgttttctttttccccatgagcctcaaggtgctcacaagcatccactagaagaatatttaaaaagactgtttccaaactgctcaatcaaaagaaagtttgaagtatgtgagatgaatgcacacatcacaaagaagttcctcagaagcctcctttatagtttttctgtgaagatatttcctttttcaccatagacctcaaagccctcacaaatatccctatgcagattctacaaaaagactgtttccaaaccgctcaataaaaagaattattgaactttgtgagatgaatgcacacatctcaaagaagtttctcagaaacttccagtctggtttttatgtgaatatatttcatttttcaccataggcctcaaagtgctccaaatatccatttgcagagtccacaaaaagactgtttccaaatggctcaatgaaaagaaagtttcaactctgtgagatgaatgcacacatcattaaaaagtttcgcaggaggcttctgtctaatttttatacgaagacatttcctttttcaccataggcctccatctgctcaaaaatatcccttagcagattctacaagaacagaatttccacactgatcaaataaaacaaacgtttttctctgtgagatgaatgcacacgtcacaaaactgtttctcagaaaccttctttatactttttatgtgatgatatttcttttttctctccaggactcaaagagctcaagaatatccctttgcagattctacaaaaagattgtttccgaagtggtcaatcaaaagaatagttcaactccgtgagatgaatgcatacatcacaaagaagtttctcagaaaccttgtttatagtttttatgtgaagatatttcctttttcaccacaggcctcaaagtgctcagcaatatctctttgtagattctgcaaaaagactgcttcccaactgctcaatcaaataaatgtttgaactctgtgagatggatgcacacatcacaagaaggtttctcagaaatcttctgtccattttttatgtgaagatatttcctttttcaccatagcactccaagtcgtgacaaatatcccttgcagcttctacaaaaagactgtttccagactgctcaatcaaaagaatggttcaactctgtgagatgattgcacacatcacaaagaagccactaagaaagcttctgtctagtttttaagtgaagatatttcctttttcaccataggccttaaagcactcacaaatatccctttgcagattctacaagaacagagtttccagacagatcatagaaaataaacgtttacctctctgagatcaatacacacaccacaaagctgtttctaagaaacctttataccttttatatgaatatattttcttttttcaccattgggcccaaagctctcataaatatccctttgcagattccacaaacagacnnnnnnnnnnnnnnnnnnnnatatccctttgcagactctacaagaacagtttccagacagatcagagaaaagaaacgtttacttctgtgagacgaatgcctacatcacaaaactgtttctgagaaaccttgtttatactttttatgtgaatacatttccttttccccataggcctcaaagcactcataaatatccctttgcagattctacaaaaagggtgtttccaaactgttcaatcaaaagaatggttgaactccacgagatgaatgcacacatcacaaagaagtttcttggaaagcttctgtctagtttttatgtgaagatatttcctatttcatcatgggcctcatagctctcaaaaatatgcctttacagattctacaaaaatactgcttccaaattgtgcaatccaatgaaggttaaatctgtgagatgaatgcacacatcacaaggagttttctcagaaggcttctctctagttttcatgtgaaaatattttgtttttcaccataggcttccaaagcatcacaaatatcccttttcagattctaccaatatattgtttacaaactgcccaatcaaaagaatgtttcaactctgtgagatgaattctcgcatctccaagatgtttcacagaaagcttctgtctactttttatgtgaagataattcctttttcaccataggcctcaaagtgctgacaaatattcctttgcagattttacaagaacataatttccaatctgttcaatgaaaagaaatggttacctctgtgagatgaaagcacacatcacagagcagtttctcagaaatattctgtctaggttttatgtaaaaataattccttttccaacataggacacaaaacgttaactaataaccctttggaaattctacaaaatactgtttccaaaatgctcatcaaaagaaaggttcacctctatgggatgaatgcacatatcaaaaagatgattctcagaaagcttctatctcgtttttatgtgaaagtgtttcctttttcaccatgggcctcaaagtgctcaaaaatatccctttgcagatcctaaaaaaagactgtttctaaaccgctgaatcaaaggaatggttcaactctgtgagatgaatgcacacatcataaagaagtttctcacaaaccttctttatagtttttatgtgaagatatttccttttaaccataggactcaaagcgctcacaaatatacctttgcagattctacaaaaagacggtttcccaactgctcaatcaaaagaattgttgaactctgagaggtgaatgcatacatcacaaagcagtttctcagaaatctttagtgtagtttttatgtgaagatactttctctttcaccatagacctcaaagtactcagaaatatccctttacaaattccacaaaaagatgttcccaaactgctcaatcaaaagaaagtttcaattctgtgagatgaatgcacacatcaccaagaagtttctcagtaggcttctgtctagtttttatgtgaagacaatttgtttttcaccatagggctccaggcactcaaaaatgtctcttagcagattatacaagaacagagtttcccaactgatcaaagaaaagaatcgtttacctctgcgagatgaatgcagacatcacaaaacagtttctcagaaaacttctttatagttttctgtgaagatacctcttttcctgcataggcctcagagtgctcacaaatatccgtttgcagattcttcaaaaagactgtttccaaacggctgaattaaaagagacgttcaaatctgtgagatgaatgcacatatcacaaagaagtatctcagaaacgttctttatactttgaatgtgaagatatttcctttgtcaagaaaggcctcaaagtgctcaaaaataccccctttgagattgtacaagaacagagtttccagactgattggagaaaagaaacacttacctctgtgagatgaatgcacacaccacaaggttgtttttacaaaacctgctttatagttcttatgtgaagatatgtcgttttccactataggattcatagcgcttcaaatattcaatggcagattctacaaaaagagtgtttcaaaattgctcaacaaaaagaaagttcaactctgtgggatgaatgcacacaacacaaagaagtttctcagaatgcttctgtctagtttttatgtgaagatatttccttttccaccataggcgtcaaagtgctctaaatatccatttgcagattctacaaaaagagtgtttcaaaactgctcaatcaaaagaaaggttcaactctgtgacctgaaagcacacatcacaaagaagtttctcagaatgattccctgtagtttttaagtgaagatatttccttttccactataggccacagagtgctccaaatatcaaattgcagagtctataaaaagtgtgtttcaaaactgctcaatcaaaataaaggttcaactttgtgagttgaatacacacatcacaaagaagtttctcagaatgcttctggctagtttttatgtgaagatacattcttttccaccatatgcctcaaagtgatccaaatatccacttgcagattctacaaaaagagtgtttcaaaactgctcatgaaaagattggttcaactctgtgagatgaatccacacatcacaaagaaggttctccgaatgtttctgtctagtttttatgtgcagatatttccttttccactataggcctcaaagctgtccaaatacaaatttgcagatggtacaaaacgaatgtatccaacctgctcaataaaaagacatgttcaactcggtgagttgaatgcacacatcacaaaaaagtttctcagaatgcttctgtctagtttttatgtgaagatatttccttttccaccataggcctcaaagtgctctaaatatccgactgttgattccacaaaaagactgtttcaaaactgctcaatcaaaagagatgttcaactccatgagttcaatgtgcacatcaaaaagaagtatcttagaatgattccgtctagtttttatgtgaagatatttccttttctatcatggcctcaaagtgctccacatatccacctgaaggttctacaaaaagagtgtttcaaaactgctcaatcaaaagaaaggtttatctctgtgagatgaatgcacacatcgtgaagaactttctcagaatgcttctctctagttttgatgtgaagatatttccttttccaccagaagccacacagcactccaaatatccacttgcagattctacaaaaagagtatttcagaactgctcaatcaaaggaaaggttcaactctgtgcgatgaaggcacacatcacaaggaaatttctcagaatgcttctgtctagtttatgtgaagatattttcttttccaacagaggccacaaagcgctcaaaaaatccacttgcagaatctaaaaaaagagtgtttcaaaactgctcaatcaaaggaaagttcaactctgtgggttgaacgcacagagcacaaagaactttgtcagaatacttccctgtagtttttatgtgaagatatttgcttttccaccataagcatcaaagcgctccaaatatccacttgcacactttacaaaaagattgtttcaaaactgctcaatcaaaagaaagtttcagctctgagatgaatgctcacatcacaaagaagtttttcagtatgcttctgtttagtttttatgtgaagacatttcattttccacaataggcctcaaggtgctccaaatatcaacttgcagattctacacaaagagtgtttcaaaactgctcagtaaaaagaatggatcaagagagtgatatgaatgcacacacaacaaataagtttctcagaatgcttctgtctagtttttaggtgaagatatttccttttacaccatagacttcaaactgatccaagtatgcctttgcagatactacaaaaagagtgtttcaaaactgctcaatcaaaagaaaggttcaactctgtgagatgaatgcacacatcaagaagaagtttgtcagaatgcttctgactaatatttatgtgaagatatttcgttttccactatagaccgcaaagtgctccaaatatccacttgcagattctacaaaaatggtgtttcaaaactgctcaatcaaaagaaagcttcaactctgtgagctgaatgcacacatcacaaagaaatttctcagaatgcttctgtctggcttaaggccacatagcactccaaatatacaattgcaggttctacaaaaggagtctttcaaaattgctctatcaaaagaaggtttccattcagtgacttgaatgcacacatcacaaagaagtttctcagaatgcttctgtctagtttttatgtgaatatatttccttcaccactataggccacaaagcactccaaatatccactggcagattttacaaaaagagtgtttcaaaactgctcaatcaaaagaaaggttgaacactgtgagttgaatgcacacatcacaaagaagtttctcagaatgcttctctgtagtttttatgtgaagatatttccttttccaccataggcctaaaagcactccaaatatccatctgcagattctacaaaaagagacattcaacactgctcaatcaaaaaaaaggttcaagtctgtgaattgaattcacacatagcaaagaactttctcagaatgcttctgtctagtttttatgtgaatatatttccttcaccactataggccacaaagcactccaaatatccacttgcagattctacaaaaacagtatttcaaaaatgctcaatcaaaagaatggctcaactctgtgagatgaatgcacacatcacaaagaagtatcacagaatgcttctgtgaatacatatttcgtttaccaccatagttctcaaaatgctacaaatatccactggcagactgtactgaaagagtgtttcaaaactggtcaataaaaagaaaatttcaactctgtgaaatgaatgcacatatcacaaagatgtttctcagaatgcttctgtctaatttttatgtgaatatatttccttttcccctataggccacaaaggcctccaaatatccacttgcagattctacaaaaagagtgtttgaaaacttcagagttaaaagaaaggttcaattctgtgagatgaatgcacgcatcacaaggaagtttctcagaatgcttctgtctaatttatgtgaagatatttccttttccaacagaggctacaaagcacttgaaatatcgactctcagattctaaaaaaagagcatttcaaaactgctcaatcaaaagaaaggttcaactctgtgagatgaacacacatagcacaaataactttgtcagaatgcttctctgtagtttttatatgaagacatttccttttccaccataagcctcaaagtgctccaaatatccacttgcacactctacaaaaagagcgtttcaaaactgctcaatcaaaagaaatgttgaactttgtgagatgaatgcacacatcacaaaaagtttctcagaatgcttctccgtagttttcatgtgaagatatatccttttccacaataggccacaaagtgctccaaatatcctcttgcagatcctaaaaaaagtgtgtttgaaaactgttcaatcaaaagaaaggttcaactctgtgtgttgaatgcacacatcacaaacaaatttctcagaatgcttctgtgtagttttcatgtgaagttatttccttttccaccataggcctcaaagcgctccaagtatctaattggagattctacagaaagagtgtttcaaaactgctcaatcaaaaggaagcttcaactctgtgagatgaaggcacacagcacaaagaagtttctcagaatgctgttgtctagtttttatgtgcagatattgccttttccacttaaggccacatagcactccaaagatccacttgcagattctacaaaaggagtctttcaaaactgctcaatcaaaagaaggattccactctttgagttgaatgcacacatcacaaaggagtatctcagaatgcttctgtgtagtatttatgtgaagatatttccttttccaccataagcctcaaagcactccaaagatccactggcagattttacaaaaagagtgtttcaaaactgctgaatcaaaagaaaggttgaactctgtgggttgaatgcacacatcacaaagaagtttctcagaatgcttctgtctaatttttatgtgaaaatatttcgttttccaccataggcctcaatgtgctccaaatatccgcttgcagattctacaaaaagagtgtttccaaacttctcaaccaaaagaacggttcaactctgtgagatgaaaccacatatcacaaagaagtttctcagaaattctccatctagtttttatgtgagaatatttcttatttcatccataggcatcaatgggctgagaaatatcccttcacagattctacaagaggactgtttccaagatgctcaattgaaagaaatgttcaactctttgtgatgaatgtgcacatcacaaagaagtttctcagaatgattctgtctagtttttatgtgaaaatatttcgttttccactataggccgtaaagcactccaaatatccacttgcagattctacaaaaagactgtttccaaactactcaatcaaaataaatgttcaactttttgagttgaatgcacccatcacaaagaagtttctcagaatgcttctgtctagtttttatgtgaagatatttcctttttcaccataggcctcaaagagctccaaatatccatttgcggattctacaaaaagagtgttcccaaactgctcaatcaaaggaaagttacaactctgtgagatgaaagaacacatcataaagaagtttctcggaaagcttctgtcttgtttttatgtgaagatattttctctttcaccatagtccagaaagtgctcaaaaatagccctttgcagattctacacaaagactgtttccaaactgctgaaccaaaagaaaggttcaactctgtgagatgaaagcacatatctcaaagaagtttctcagaaagcttctgtctggtttttatgagaagatatttcctatttcaccataggtctcaatgggctgagaaacaaccctttgcagattctacaaaaggactgtttccaaactgctcaatccaaagaaagtttcacctctttgagttgaatgcatacatcacaaagaagtttctcagaatgcttctgcctagtttttatgtgaagatgtttcctttttcaccataggccttaaactgctctcagatatccctctgcagatgctacaaaaagactgtctccaaactgctccatcaaaataagattcaactctgtgagatgaaaggatacatctcaaagaagtttctcagaatacttctgtctagtttttatgtgaagatatttcttttttgatataggcttccaacttctcagaaatatccctttccagattgtacaaaaagactgtatccaaacttctcaatgaaaagaaactttcaactctgtgtgatgtatgcacacatcaaaaagaagtttctcagaaagcttctgtttatttttcatgtgaagatagttcctttttcaccacaagcctcaaagcgctccaaatatccatttgcagattgtacaaaaagactggttccaaactgctcaatcaaaagaaagtttcaaatctgtgacatgaaagcacacatcactaagaagtttatcagaaagcttctgtctagtttttatgtgaagatatgtcctttttcaccataggcatccatgggaaaagaaatatccctttgcagatcctacaaaaagactgtttccaaactgctcaaccaaaagaatggttcaactctgtgagatgaaagtacatatcacaaagaagtttctcagaaatcctctgtctagtttttatgtgaagatatgtcctttttcaccataggcatccatgggaaaagaaatatccctttgcagatcctacaaaaagactgtttccaaactgctcaaccaaaagaatggttcaactctgtgagatgaaagtacatatcacaaagaagtttctcagaaatcctctgtctagtttttatgtgaagatatttcctatttcatccataggcctcaatgggctcagaaatatcccttcacagattctacaaaacgactgtttccgaagtactcaatccaaagacaggttcagctctttgagatgaatgcacacaacacaaagaagtttctcagaatgcttctacctagtttttatgtgaagatatttcctttttcaccacaggccttaaactgctctcacatatacctcttcagatactacaaaaagactgtttccagactgctccatcaaaagaaaagttcaactctgtgagatgaatggatacatcacaaaaaattttctcagaatacttctgtctacattttatctgaagatatttctttttcaccataggcctctaacttcgcagaaatattcctttgcagattgtacaaaaagactgtttccaagctgttcaatgaaaagaaagtttcacctctgtgagatgtatgcactcatcaaaaagaagtttctcagaaagcttctgtttagatttcatgtgaagatatgtcctttttcaccataggcctcaaagtgcttgaattatcctttgcagattccacaaaaagactgtttccaaactgctcaattaaaagaaaggttcaaacctgtgagatgaaagcacacatcactaagaagtttctcagaatgcttctgtctagtttttaagtgaagatatttcctctttcaccataggtctcaatgggctcagaaatatccctttgcagatcctacaaaaggactgtttcccaactgcttaatcaaaacaaaggttcaactctgtcagatgaatgcacacttcacaaagaaatttctcaaagtgcttctgtctagtttttatgtgaagatatttccttttccaccataggcctcaaagaactcaaaatgtccatttgcagatactacagaaagatgctttccaaccagctcaatcaaagaaaatattcagctctgtgaattgaatgcacatcacaaagtagtttcccagaatgcttctgtcttgtagatatgtgaagatatttccttttccaatatatgccacaaagtgctccaaatatcaacttgcagattttgtaaaaagagtgtttcaaacttcccaatataggaaatgttcaactctgtgagatgaatgcacacaacacgaagaagttcctcagcatgtttctgtctggtttttatatgaagatatttccttatccactataagccacaaagcgctccatatatccacttgcagatactacaaaaagagtgtttccaaactgctcaatcaaaagaaaggttcaactctgtgagttgaatgtgcacatcacaaagaattttctcagaatgcttctgtctagttttcatgtgacgatatttccttttccaccacacgcctcatagtgctccaaaaatctacaagcagattccataaatagagtatttcaaaaatgctgaatcaaaagaaagtttcagctctgtgagatgaatgcacacatcacaaagaagattctcagaatgcttctgtctagttttcgtgtgaagatatttccttttccacattacgtctcaaatctcttcaagtatcccttgcagattctacaaaaagagtgtttcaaaactgttcgatagaaagaaaggttcaagtctgtgagatgaatgcacatctcacaaagaagtttctcagaatgcttctgtctagtttttatttgatgatttatccttttccacaataggctgtaaagcgctccaaatatccacttgcagattcttcaaaaaaagtgtttccagactgctcaatcaaaggaaaggttcaactctgttagttgaatgcacacattacaacaaagtttctcagaatgcttctgtctagtttttaggtgaagatattcccttttaaactgtagtctgcaaagtgctctgaatatccacttgcagattctacaaaaagagtctttcaaaactgctcaatcaaaaaaagggttcaacagtgttagttgaatgcacacatcacaaagaagtttctcagaatgcttctgtctagtttttatgtgaagatatatccttttccaccataggccccaaagtaatccaaatatccactggtagagtctacaaatgtgcgtttcaacactactcaatcaaaagaaacgttcaactctgtgagatgaaagcacgcatcacaaagttgtttctcagaatgctctgtctagtttttatgtgaaaatatttccttttataccataggccccaaagtattccaaatatccaccttcagattctacaaaaagtgtctttcaaaactgctcaatcaaaagaaaggttcaaacctgtgagatgaatgcacacatcacaaaggagtttctcagaatgcttctgtctagtttgtatgtgaagttatttcctttaccaccataggactgaaagagctccaaatatccacttgcagattctacaaaaagagtgtttcaaaattgctcaatcaaaagaaaagttcaactctgtgagaagaatgcacacatcacaaaaagtttcacagaatgcttctatctattttttatgtgaagatatttccttttccacttgaggctggaaagctcttgaaatatccaattgcagattcttcaaaagagtgtttcaaaactgctcaatcaaaggaaaggtacaattcagtgaactgaatgcacacatcagaaggaagtttctcagaatacctctgtgcagtttttatgtgaagatatttacttttccaccataggccccaaggctctccaaatatccaattgcagtttcaataaaaagtgtgtttcaaaactgctcaatcaaaagaaaggttcaactctgtgggaggaaagctcacatcacaaacatgtttctcagaatgcttctgtcttttttctgtgtgaagatatttccttttccactagaggatgcaaagcgctcaaaatatccacttgcagattttacaaaagggtgtttataaagtgctaaatcaaaagaaagtttcaagtctgtgagatgaatgcacatatcccaaagaagtttctcagaatgcttctgtctagtttttatgtgaaaatataaaattttccactataggccacaaagcgcttcaaatatccacttgcatattcctcaaaaagagtgtttcaaaactgatgaatcaaaagaaaggttcaactgtgtgagatgaatgcacacatgacaaagaagtttctcagaatgcttctgtctagttttatgtgaagatatttcctctaccatagggaacaaagcactccaaatatccacttacagattctacaaaaatggtgtttccaaactgctcaatcaaaacaaagtttcaactctgtgagatgactgcacacatcataaagaagtttctcagaatgcttctgtgtagtttttatgtgaagataattccttttccaccataggcctcaaagtgttccatatatctacctgcagattctacaaaaagagtgtgtcaaaactacttaatcaaaagaaaggttccacccagtgagatgaatgcactcgtcacagagaagattcccagaatgcttctgtctagtttttatgtgaagatgtttttccttttccactataggaagcaaagcgttccaaatatccaattgcagattccacaaaaaatgtgtttcaaaactgctcaatgaaaagaaatgttgaattctgtgagataaaagcacacatcataaaggagtttctgagaatgcttttgtctggtttttatgagaagatatttccttttcaactataggcctcaaagtgctccaaatatacatttgcagatgctacaaaaagaatgttaccaaactcctcaaagatacgttaaactttttgagttgaatgcacacatcacaaagtagtttctcagaatgcttctgtccagattttatttgaagatatttcctttaccaacataggcctcaaagctctccaaatatcgaattgcagattccacaaaaacagtgtttgaatactgctcaaacaaaagaaaggttcaaccctgtgagatgaatgtacacatcacacagaagtttctcagaatgcttctgtgtagtttttatgtgaagatatttcctttaccaccataggcctcaaagtgctccaaatatccacttacagattctacaaaaagagtgctttaaaactgctcaaccaaaagaaaggttcaactctttgtgatgaatgcacacatcacaaagtaatttttcagaatgcttctgtctagtttttatgtgaatatacatccttttccactataggccacaaagtcctccaaacacccacttgcggattctacaaaaagagtgttttaaacctcctcaacaaaaaagtttcagctctgtgaggtgaatgcatacatcacaaagaacattctcagaatgcttctctctagtttttatgtgaatatatttgcttttccaccataggccacaaagcgcaccaagtatccacttgcagattttacaaaaatagtgtttcaaaactgctcaaacaaaagaaaggttcaactatgtgagttgaatgcacacatcacaaagaagtttctcagaatgctgctgtctagcttttatccaaagttatttccttttccactatactccacaaagccctccgaatatccacttgcagattctacaaaagaagtgtttcaaaactgcacaatcaaaagaaagtttcaactctgtgagttgtatgcacacgtcagaaagaagtttctcagaatgcttttgtgtagtttttatgtgaagatatttccttttccaccataggccccaaagctctccaaatatccacttgcagattatacagaaagagggattcaaaactgctcaatcaaaagaaaggttcaactctgtgagttgaaggcacacataacaaagccgtttctcagaatgcttctccatagtttttatatgaagatatttccatttccaccattctctccaaagcgctccaaatatccacttgcagattctataaaaagagtgtttcaaaactgctcaatgaaaagaaagtttaaactctgttagatgaatggacacatcacaaagacatttctcagaatgcttctgtctagtgtttatgtgaagatatttccttttccaccacatgcttcaaagcgctctaaatatgcacttgcagattctaccaaaagagtgtttcaaaactgctcaatcaaaggaaaggttcaaatctgtgagatgaacgcacacatcacaaagaagtttctcggaatgcttctgtctagtttctatgagaagataattcttgtccaccataggccccaaagggctccaaatatccaccgcagatcctacaaaaagtgtttaaaaaatgctaaatcaatagaaagtttaaactctgtgcgatgtatgcacacatcacaaagaagtttctcagaatgcttctctctagtttttatgtgaggatatttccttctccaccataggcctgaaagcactccagatatcccctggcagatcctaaaaaaacagaggttcaaaactgctcaatcaaaagaaattttcaaatctgtgagatgaatgcacacatcacaaagaagtttctcagagtacttctgtctagtttttatgtgaagatatttccttttccaccatactcatcaaagagttccaaatatccacttgcacattctacaaagagagtgtttcaaaacctgctcaatcaaaagaatggttcaactatgtgagatgaatgcaaacatcacaaagaagtatctcagaatgcttctgtgtagtttttatgtgaagatatttcctttaccaccgtaggcctcaaagcgctccaaatatccacttacagtttctccaaaaagcgtgtttcaaaactgttcaatcaaaagaacggttgaactctttgagatgaatgcacacatcaaaaaagtttttcagaatgcttctctctagtttttatgtgaatgtgcatccttttccactataggccacaaagtgttccaaacacccacttgctgattctacaaaaagagtgtttcaaacctcctcaataaaaaaagttaaaactctgtgaggtgaatgaacacatcacaaagaagattctcagaatgcttctgtctagttgttacgtgaagatatttgcttttccaccatcggctgcaaagtgcaccaaatatccacttgcagattctacaaaaatagtgtttcaaaactgctcaatcaaaagaaaggttcaactctgtgagttgaatgcacacatcacaaagaagtttctcaggatgcgtctgtctagcttttatgcaaagttatttccttttccacaatactccacaaagccctccgagtatctacttgcagattctacaaaaagagtgtttcataactgcacaatcaaaagaatggttcaactctgtgggttgtatgcacacatcacaaagaagcttctcagagtgcttttgtataatttttatgtgaagatatttcatttcaccagaggccccaaagcgctccaaatatccacttgcagattctacaaaaagagggattcaaaactgctcaatcaaaagaaaggttcaactctgtgagttgaatgcacacatcacaaagacgtttctcacaatgcttctccatagtttttatatgaagatatttcttccatttccaccattctctccaaagcgttccaaatatccacttgcagattctacaaaaagagtgtttcaaaactgtccaatcgaattaaagtttcttctctttgagaagaatgcacacatcacaaaggagtttctcagaatgcttctgtgtagtttttatgtgaaggtatttccttttacaccataggtcacaaagggctccaaatattcacttgcagattctacataaggagagtttcaaaactcctctatcaaaagataggtacaaccctgagttcaatgcacacatctcaaagaagtttctcagaatgcttctgtttagtttttatgtgaagatatttccatttctacaataggcctcaaagcgctccaagtatccacttgtagattttactaaaagagtgtttccaaactgctcaatcaaaagagatttacaactctgtgagatgaatgcacaagtcacacagaactttctcagaatgcttctgtgtagtttttatgtgaagatatttccttttccacaatgggcctcaaagcgctctatgagatgaatgcacacgtcaaaagacatttctcagaatgcttctgtgtagtttttatgtgaaaatatttccttttacaccataggccgcaaaggcctccaaatatccacttgcagattctacaaaaagagagtttcaaaattgctcaatcaaaagataagttcaactctgtgagctgaatgcactcatcacaaacaagtttctcagaatgcttctgtgtagtttttatgtggagatatttccttttccacaataggcctctaagcactacaaatatccacttgcagattctacaaatagtgggttttaaaactgctcaatcaatagaaatgttcgccaccgtgtcttgaaagaaacatgtcacaaagaagtttctcagaatgcttctgtgtagctttaaatgaagatatttcctttccaccataggcctcaatgcactccaaatatctacttgcagattctacaaaaagtgtgtttcaaaattgctcaatcaaaagaaagttgaactctgtgagatgaatgcacacattgcaaagaagtttctcagaatgcatctgtgttgtttttatgtgaagatattttccacaataggcctcaagggtctccaaatatccacttgcagattctacaaaaagactgtttcaaaactgctcagtgaaaagaaaggttcaactctctgggatgaatgcacacaggacaatgaagtttctcagaatgcttctgtgtagtttttatttgaagttatttgcttttccaccagaggccacaaagggctccaaatatccacttgcagattctacaaaaagagagtttgaaaactgtgcaattaaaagatatattcaaatttgtgattggaaggcacacatcagaaagaagtttctcagaatgcttctgtgtagattttatgcaaagatatatccttttccaccataggtctcaatgcgctccaaatatccacttagagatattacaaaaagagtgtttgaaaactgctcaataaaaagaaaacttcaactctgtgagatgaacacacacatcgcaaagaattttggcagaatgtttctgtgttgttttcatgtgaatatatttccttttccacaatagacctcaaagtgctccaaatatccacttgcagatcctacaaaaaagaatgtttcaaaactgctcaatcaaaagcaatgttcaactccgtgagattaatgcacacatcacaaaaaagtttctcagaatgcttccacatagtttttatgtgaagataattccttttccaacacaggactcaaaagactccaaatatccacttgaagattctacaaaaatagtgtttaaaaatgctcaataaaaagaaatgttgaactctgtaaagtgaatgtacacataaccaagaaattttttcagaatgcttctgtgtagcttttaagcgaagatattacattttccaccacaggctgcaatgggctctaaatatccagttgcagattctacaaaaagagattttcaaagctcctcaataaaaagataagttcaactctgtgagttgaatgcacacatcagaaagaagtttctttgaatgctactgtgtagtttttatgtgaagatattaccttttacaccataggcctcaaagcgctccaaatatccacctgcagattccaaaaaaagagagtttcaaaactgcttatcaaaagacagattcaactccgtgagttgaatgcacacatcacaaataagtttctcagaatgcttccgtgtattttttatgggaaaatatttcctttgcctcataacactgcaaatatccacttgcagatcgcactaagagtatttccaaactgcacagtcaaaacaaaggtgaaatgaatgcacacattgcaaaaagtatctcagactcttttgtgtagtttttatttgaagatattttcttttttacaataggcctcaatgctctccgaagatccacttgcaaattcttcaaaagagtgtttccaaactgctcaatcaaaagaaagattcaactctgtgagatgagtgcacacatcacaaggtagtttgtcagaatgcttctgtgtagtttttatgtgaagatatttccttttccaccttaggccacaaaaagctccacatatccacttgcagtttctaaaaaaataatgtttccaaactggtcaatgaaaagaaagtttcaactctgtgagttgaatgcacacatcacaaagaagtttcacagaattctactgtgtagtttctatgtgaagatatttccttttccacaataggcctcaaagtgttccaagtatccacttgcagtttctacaaaaagattgtttcaaaactgctcaatgaaaagataagttcacctctgtgagtttaatgcacacatcacaaattagtttctcagaatacttctttgtagtgtttatgtgaagatatttccttttccacaatagacctcaaagtgctccaattatccacttctaaattctccaagagagtgtggcaaaactgctcatacaaaggaaagtttcaactctgtgagatgaatgcacacatcacaaagaaatttatcagaatttttgtgtgtggtttttatgtgaaaatatttccttttccacagtaggcctcaaagcgctccaaatatccacttgcagcttctacaaagccagtgtttcaaatcagctcaatcataagatagtttcaactccgtgagatgaatgcatacatcacgaagaagtttctcagtatgcttctgtgtagtgtttatttaaagatatttccttatcgtccataggccacaaagggctccaaatatccatttgcagattctacaaaaagagagattcaaaactctcaatcaaaagataggttaaactctgtgactttaattcacacatcacaaagaagtttctcagaatgcttctttgtagtttttatgtgaagatattaccttttccacaataggcctcaaagcgctccaaatatccacttgcagattctacaaacagtgtttcaaaacttcgcaatcgaaacataggttcaactctctgagttgaatgcatacatcataaagaagtatctcagaatgcttttgtgtagtttttatgtgaagatatttcttttttttttgtattcattcttttttttttaattttttttttttaattatactttaagttttagggtacatgtgcacattgtgcaggttagttacatatgtatacatgtgccatgctggtgcgctgcacccactaacgtgtcatctagcgttaggtatatctcccaatgctatccctcccccctcccccgaccccaccacagtccccagagtgtgatattccccttcctgtgtccatgtgatctcattgttcaattcccacctatgagtgagaatatgcggtgtttggttttttgttcttgctatagtttactgagaatgatggtttccaatttcatctatgtccctacaaaggacatgaactcatcattttttatggctgcatagtattccatggtatacatgagccacattttcttaatccagtctatcattgttggacatttgggttggttccaagtctttgctattgtgaataatgccgcaataaacatacatgtgcctgtgtctttatagcagcatgatttatagtcatttgggtatatacccagtaatgggatggctgggtcaaatggtacttctagttctagatccctgaggaatcgccacactgacttccacaatggttgaactagtttacagtcccaccaacagtgtaaaagtgttcctatttctccacatcctctccagcacctgttgtttcctgactttttaatgattgccattctaactggtgtgagatgatatctcatagtggttttgatttgcatttctctgatgaccagtgatggtgagcattttttcatgtgttttttggctgcataaatgtcttcttttgagaagtgtctgttcatgtcctttgcccactttttgatggggttgtttgtttttttcttgtaaatttgtttgagttcattgtagattctggatattagcccttggtcagatgagtaggttgcgaaaattttctcccatgttgtaggttgcctgttcactctgatggtagtttcttttgctgtgcagaagctctttagtttaattagatcccatttgtcaattttggcttttgttgccattgcttttggtgttttggacatgaagtccttgcccacgcctatgtcctgaatggtaatgcctaggttttcttctagggtttttatggttttaggtctaacgtttaaatctttaatccatcttgaattgatttttgtataaggtgtaaggaagggatccagtttcagctttctacatatggctagccagttttcccagcaccatttattaaatagggaatcctttccccattgcttgtttttctcaggtttgtcaaagatcagatagttgtagatatgcggcattatttctgagggttctgttctgttccattgatctatatctctgttttggtaccagtaccatgctgttttggttactgtagccttgtagtatagtttgaagtcaggtagtgtgatgcctccagctttgttcttttggcttaggattgaattggcgatgcaggctcttttttggttccatatgaactttaaagtagttttttccaattctgtgaagaaagtcattggtagcttgatggggatggcattgaatctgtaaattaccttgggcagtatggccattttcacgatattgattcttcctacccatgagcatggaatgttcttccatttgtttgtgtcctcttttatttccttgagcgatggtttgtagttctccttgaagaggtccttcacatcccttgtaagttggattcctaggtattttattctctttgaagcaattgtgaatgggagttcactcatgatttggctctctgtttgtctgttgttggtgtataagaatgcttgtgatttttgtacattgattttgtatcctgagactttgctgaagttgcttatcagcttaaggagattttgggctgagacaatggggttttctagataaacaatcatgtcgtctgcaaacagggacaatttgacttcctcttttcctaattgaataccctttatttccttctcctgcctgattgccctggccagaacttccaacactattttgaataggagcggtgagagagggcatccctgtcttgtgccagttttcaaagggaatgcttccagtttttgcccattcagtatgatattggctgtgggtttgtcatagatagctcttattattttgaaatacgtcccatcaatacctaatttattgagagtttttagcatgaagggttgttgaattttgtcaaaggctttttctgcatctattgagataatcatgtggtttttgtctttggctctgtttatatgctggattacatttattgatttgtgtatattgaaccagccttgcatcccagggatgaagcccacttgatcatggtggatcagctttttgatgtgctgctggattctgtttgccagtattttattgaggatttttgcaccaatgttcatcaaggatattggtctaaaattctcttttttggttgtgtctctgcccggctttggtatcagaatgatgctggtctcataaaatgagttaaggaggattccctctttttctattgattggaatagtttcagaaggaatggtaccagttcctccttgtacctctggtagaattcagctgtgaatccatctggtcctggactctttttggttggtaaactattgattattgccacaatttcagatcctgttattggtctattcagagattcaacttcttcctggtttagtcttgggagagtgtatgtgtcgaggaatgtatccacttcttctagattttctagtttatttgcatagaggtgtttgtagtattctctgatggtagtttgtatttctgtgggatcagtggtgatatcccctttatcattttttattgtgtctatttaattcttctctctttttttctttattagtcttgctagcagtctatcaattttgttgatcctttcaaaaaaccagctcctggattcattgattttttgaagggttttttgtgtctctatttccttcagttctgctctgattttagttatttcttgccttctgctagcttttgaatgtgtttgctcttgcttttctagttcttttaattgtgatgttaggttgtcaattttggatctttcctgctttctcttgtgggcatttagtgctataaatttccctctgcacactgctttgaatgcgttccagagattctggtatgtggtgtcgttgttctcgttggtttcaaagaacatctttatttctgccttcatttcactatgtacccagtagtcattcaggagcaggttgttcagtttccatatagttgagcggctttgagtgagattcttaatcctgagttctagtttgattgcactgtggtctgagagatagtttgttataatttctgttcttttacatttgctgaggagagctttacttccaaatatgtggtcaattttggcacaagagtcctgaaagccctccaagtatccacttgcagattctacaaagagagtgtttcaaaaatactcaataataagatatgttcaaatctatgagatgaatgcacacatcacaaagaagtttctcagaatgcttctgtgtagtatttatttgaagatatttccttatcctccattggccacaaagggcttcaaatatccacttgcagattctgcaaaaagagaaattcaaaactgctcaatcaagagataggttcaactctatcagttgaatgcacacatcacaaagaagtttcttggaatgcttctgtgtagtttttatgggaagatatttccttttccacaacaggtataaaagcgctccaaatatccacttgcagattctacaaaaagagtttgtcaaaagttctcaatcaaaagaaactttcaactctgtgggatgaatgcacacatcacatagatgtttctcagaatgcttctgtgtagtttttacgtgaagatatttgcttttccacagtaggcctcaaagcgctccaaatatccacttgcagattctataaaaacagtgtttcaaaactgctcaatcaaaagaaacttacaactctgttagatgaatacacacaacaaaaagtagtttctcagaataaatctgtgtaagttttatgtgaagatatttccttttacacaataagccaaaaagcactccaaatatacacctgaagattctgcaaagagagtgtttcaaagctgctcagtcataagataggttcatctctgtgagatgaatgcacgcatcacaaagtagtttctcagaatgcttctgtgtagtttttatttgaagatatttcctttgcctccatggactgcaaagggctccaaatatccacttgcaaatcctagaaaaagagagatccaaaactgctcaattgaaagataggttcaagactgtgagttgaatgcacaaatcacaaagaagtttctcagaatgcttctgtgtagtttttatgtgaagacgtttccttttccaaaataggcctcaaagcccaccaaatatccacttgcagattctataaaaacagtgtttcaaaactgctcaatcaaaagacatattagaatatgggagttcaatgcacacatcacaaagaactttctcagaatgcttttgtgtagtttttatgtgaacatatatccttttccacaatatgcctcaaatcataccaaagatccacttgcagattctacaaagagagggtttgaaaactgctaaaccataacatagattcaacattttgagatgaatgcacacatcacaaagaagtttctcagaatgattctgtgtagtttctatgtgaagatatttccttgtccactataagaaaaaaagggctccaaatatccacttgcagattctacaaaaagagtgtttctaagctgctcaatcaaaagaaagtttccactctgggagaagaatgcccacatcaccagaaagtttgtcagaatgcttctgtgtagtttttttgtgaagatatttccttttccaaaaaagacctcaaagcgctccaattatccacttgcagattctacaaaaagagtgtttcaaaatgctcaataataagataggttcaactttgtgatattaaggcacacttcacatagaagtttctcagaattcttctgtgtagttttatgtgaagatattcctttttccaccataggcctcaaaaggctccaaatgtccacttgcagataataaaaaaagtgagattcaaaactgttcaatcaaaagataggttcaactctgtgagttgaatggacacatcacaaagaagtttctcagaatacttctgtgtagtttttatgtgaagatacattctattccaaaataggcctaaattccacccaaatatccacttgcagattctgcaaaaagagtgtttcaaaactgctcaatcaaaagaaaagttaaactctgtgagatgaatgcacccatcacaaagaagtttcttagaatacttctgtgtagtatttatgtgaagatatttcttcttccacaataggactcaaagcactccaaatatccacttgcacattctacaaaaagtgtgtttcaacgctgttcaatcataaggtatgttcaactatgtgaggtgaatgcacacatgacaaggtagtttctcagaattcttctgtgcttttttatttgaagatatttccctttccagcacagaccacaaagggcttcaaatatagacttgcagaatctacaaaaagagttcttcaaaactgctcaatcataatataggttcacctctgtgaattgaatgcacacatcaccaagaagtttctcagaatgcttctgtgtagtttttatttgaagatatttcctttgcctccatggaccgcaaagggctccaaatatgcacttgcagattgtagaaaaagagagatccaaaactgctcaatcaaaagataggttcaaggctgtgagttgaatgaacacatcacaaagaagtttctcagaaggcttcagtgtagtttttatgtgaaggtatttcgctttccaccataagccaaaaagttctccaaatatccacttgcagattctacaaaaagagtgcttcaaaactgctcaatcaaaagaaagttttatctctgggagatgaacgcatacatcacagggaagtttcttagaatgcttctgtgtagtttttatgtgaagatatttccttttccaaaaagcctcaaagctcaccaaatatccacttgctgattctacaaaaagagtgtttgaagcccgctgaatcaaaagacaggttcaactctgtgagataaatgcataaatcacgtagaagtttctgagaattcttctgtgtagattctatttgaagatatttccttttcctccatagaccacaaattgctccaaatatccacttccagattctagaaaaagagagatccaaaattgctaaatcaaaagataggttcaagaatgtgagttgaatacacaaaccacaaagaagtttctcagaatgcttctgtgtagtttttatgtgaagatattttcttttccacaataggcctccaagcccaccaaatttccagctgctgattctacaaaaagagtgtgtcaaatctgctcaatcaaaagacaggttcaactctgtgagatgaatgcacacatcacaaggaagtttcagagaatgctgctgtgtagtttttatgtgaagatatttcctttcctaaactagacctcaaagcactccaaatatccacttgcagattctaccaaaagagtgtttcaaaactgctcaatcaaaagaatggtgcaactctgtgagatgaatgcacacatcacaaagaagtttctcagaatgcttctgtgtagttttaatgtgaagatactttcttttctagaataggcctaaaatccctccaaatatccactgcagattctacaaaaagagtgtttcaaaactgctcaatcaaaagaaaagttcaaatctatgtgatgaatgcactcatcacaaattagtttctcagaatgattagtttctcagaaagtttcagagtagtttttatgtgaaattatttccttttccacaataggcctcaaagcactccaaatatcctcttgcagattctacaaaacagtgtttcaaaactcctcaatcaaaagaaagtttcaacactgtgagatgaatgcacacatcacaaagaagtttctcggaatgcctctgtgtggcttttatgtgaagatatttgtttttccacagtaggcctcaaagggctccaaatatccacttgcagattctaccaaaagagtgtttcaaaactgctcaatcaaaagaatggttcaactctgtgagatgaatgcatacatcacaaagaagtttctcagagtgcttctgtgtagtttttatgtgaagatatttctttttctaaaataggcctaaaatccctccaaatatccacttgcaaattctacaaaaagagtgtttaaaaactgctcaatcaaaagaaaagttcaaatctatgtgatgaatgcactcattacaaattagtttctcagaatgattagtttctcagaatgtttcagagtagtttttatgtgaaattatttccttttccacaataggcctcaaagcactccaaatatcctcttgcagattctacaaaacagtgtttcaaaactgctctaccaaaagaaaggttcaacaatgtgagatgaatgcacacaacccagagaagattctcagaatgcttccgtgtaatttttatttcatgatacttccttttcctccataggctgaaaagggctccaaatatctacttgcagattctacataaagagagattcaaaactactgaatcaaaagataggttcaactctgtgttatgaatgcactcatcacaaagaagtttctcagaatgcttctgtgtagtttttatgtgaagatatttacttttacaccatagacttcaaaactctccaaatatccacttacagattctacaaaaagagtgatcccaaatggctcaaaaaaagaaatgttcaactctgtcaaatgaatgcacacatcacaaagaacttcctcagaatgcttctgtgtaatttttatgtgaagatatttccttttccacaatagacctcaaagagctccaaatatccacttgcagattctacaaaaagaatgtgaaaactgctcaatcgacagaaaggttcaactctgtgagatgaatgcatacatcacaaagaagttcctcagaatgtttccatgtgttttatttttgtgaagatatttccttttccacaataggtaccaaagcgctccagatatccactttcagattcttccaacggagggtttcaaaattgctcaatcaaaagataggttcaagtgtgtgagatgaatgcacacaacaccaagaattttctcagaatgcttctgtgtagtttttatgtgaagttacttccttttccaccataggctgcaaagggctccaaatatccacttgcagattctacagaaggagagattcaaaactgctcaatcaaaggtagcttcaactctgtgagtttaatgcacacatcacaaagaagtttttcagaatgcttctgtgtagtttttatgtgaggatatttccttttgcaatatatgctgcaaaggcctctaaatacccattccagaatcttcaaaaagagagtttcaaaactgctccatcaaaagataggttcaactccatgagatgaatgcacacatcataaaatctttctcagaatgcttctgtgtagtttttatgtgatgatatttttttttccaccataggccgcaaatggttgcaaatatccacttgcagattccacagaaagagagactcaaaactgctccatcaaaagatagattcaaccctgtgagttgaatgcccagatcacagagaaatttctcagaatgcttctgtgtagtttttatgtgaagatatttctgtttccaccagacgcctcaaagtgctacagatatcaacttgcacattctgcaaaatgagtgtttccaaactgctcaaccaaaagaaacgttcaacactctgagatgaatgcacacatcacaaagaagtttctcaaaattcttctgtgtagtttttatgtgaagatatttccttttccatattaggctgcatagggctcccaatatccacttgcagattattgaaaaagatagtttcaaaccgctcaatcaaaaaatacgttcaactctgtgagtagaatgaatacatcacaaagaagtttctcagaatgcttgtgtgtactttttatgagaagacatttccttttccaccatacgctacaagggtttcctaatatccacttgcagattctacaaaaagagagtttcaaaactggtcaaccaaaagataggttcaaccctgtgagttgaatgcacacacaacaaagaagtttctcaaaatagtttttttgtagtttttatgtgaagatatttccttttccaccgtaggcctcaaagtgctccaaatattaaattgcagattctgcaaaaagagtgtttccaaactgctaaaactaaagaagagttcatctctgtcagatgaatgcacacatcacgatgaagtttctcagaatgtttctgtgttgtttttaagtgaagatatttccttttccacagtaggccttaaagcactccaaatatccattgaagattctacaaaaagtgtttccaaactgctcaatcaaaacaaagcttcaactctgtgagatgaatgcattgtcacaaagaagtttctcagaatgtttctgtgtagttttaaagtgaagatatttccttttacaccacaggccgcaaatggctccaaatatccactttcaggttctagaaaaagagagtttcaaaacttcttaatcaaacgataggttcaactctggaaggtgaatgcacatgtcagaaaaaagtttcccagaatgcctctgtgtatttttcatatgacgacatttcctttaccaccataggactcaaaaccctccaaatatccacctgcagattctacaaaaagagtgttcccaaactgcacaatcaaaagaaaagttcaactctgtgagatgaatgcacacatcacaaagaagtttctcaggatgcttctgtatagtttttatttgaggatattttcttttataccatagcccacaaagggctccaaatatccacttgcagattctacaaaaagagagtttgaagactgctgtatcaaaagataagttcaactctgtgagttgaatacacacataacaaagaagtttctcagaatgcttctgtgaagtttttatatgaagatatttccttttccacaataggccacatagcgctccaaatatccacttgcagattctacaaaaacagtgtttccaagctgcacaatcaaaagaaatgttcaaccctgtgagatgaatgcacacatcacaaagaagtttctcagaatgcttctgcgtagtttttatgtgaggatatttccttttccacactaggcctcaaatgctccaaatatccacttgcagattctacaaaagagagattcaaaactggtcaatcaaaagatagatttagctctgagagttgaatgcacacatcacaaagaagtttctcagaatgcttttgtataggttttatgtaaagatatttccttttccgccataggcctcaaatccctccaaatattcacttgcagattctataaaaggagtgtttccaaactgcccccaaaaaagaaaggttgaattctttcagatgaattcacacatcacaaagaaatttctcagaatgattctgagtagtttttatgtgaagatattaagttttccacaataggcctcaaagccctccaaatatccacttgaacattctacaaaaagtgtatttcataactgttcaatcaaaagaaaggttctactctgtgagatgaatgtacacatcacaaagaagtttctcagaatgcttctgtgtagtttttatctgaagatatttccttttccaacataggctgcaaaaggctcaaaatatccacttgaagattgcacaaaaatacaggttcaaagctgctcaatccaaagatatgttcaaatctgtgagttgaaagcacacatcacaaggtagtttctcaaaatccttctttgcagtttttatgtgaagatatttccttttccaccgtaggcctcaaagcactccaaatatccaatttcacattccacaaaaagagcatttcaaaactgcttaatcaaaagaaaagttcaactcagtgaaatgaatgcacacatcaccaagcagtttttcagaatgctcatgtgtagtgtttatctgaagatatttccttttccacaataagcctcaaagggctccaaatatccacttgcagattctacaaaaagattgtttccaaactgctcaaacaaaagaaagtttcaactctgtcagatgaatgcacacatcaaaaagaagcttctcagaatgcttctgtgtagtttttatgtgaagatatttcctttaacacaataggccccaaatcgctccaaatatccacttgcagattctacaaaaagagagtttgaaaattgccctctaaaaagacaggttcaactctgtgagttgaatacacacataacaaagaagtttctcagaatggttctgtgaagtttttatgtgaagatatttccttttccacaataggccacatagcgctccaaatatccacttgcagattctacaaaaacagtgtttcaagctgcacaatcaaaagaaatattcaactctgtgagatgaatacacacatcaccaataaatttctcaaaacgcttctgtttagtttttatgtgaagatgtttccttttgcaccataggccacaaaggtctccatatatccacttccagattctacaaaaagatattttcaaaactgttcaatcaaaagatatgttcaactctgagagttgaatgcacacatcgcaaagaagtttctcagagtactcctgtgtattttttttaatttattttattttattattattaatacactttaagttttagggtccatgtgcacattgtgcagcttagttacatatgtgtacacgtgccatgttggtatgctgtacccattaactcgtcatttagcattaggtatatctcctaatgctatccctcccccctcccccaccccacatctgtccccagtgtgtgatgttccccttcttgtgtccatgtgttctcattgctcaattcccacctatgagtgagaacatgcagtgttgggttttttgtccttgcaatagtttactgagaatgattatttccgatttcatccatgtccctacaaaggacatgaactcatcattttatggctccatagtattccatggtgtatatgtgccacattttcttaatccactctgttattgttggacatttggtttggttccaagtctttcttattgtgaatagtgctgcaataaacttatgtgtgcatgtgtctttatagcagcatgatttatagtccttgggtatatacccagtaatgggatggctgggtcaaattgtatttctagttttacatccctgaggaatggccacaatgacttccacaatggttgaactagtttacagccccacaaaaagtgtaaaagtgttcctatttctccacatcctctccaacacctgttgtttcctgaattttaatcattgccattctaaccggtgtgagatggtatctcattgtggttttgatttgcatttctctgatggccagttaagaatgagcatttttccatgagttttttggttgcataaatgtcttctgttgagaagtgtctgttcatgtccttcacccactttttgatggggttgtttgttttttcttgtaaatttgtttgagttcattgcaaattctggatattagccctttgtcagataaataggttgtgaaaactttctcccattttttacattgcctgttcactctgatggtagtttcttttgctttgcagaagctctttagtttaattagatcccatttgtcaattttggcttttgttgccattgcttttggtgttttagacatgaagtccttgcccatgcctatgtcctgaatggtaatgcctgggttttcctctaggatttttatggttttaggtctaacgtttaagtttttaatccatcttgaattaatttttgtataaggtgtaaggaagggatccagcttcagctttctacatatggctagccatttttcccagcaccatttattaaacagggaatcctttccccattgctggttttgttcaggtttatcaaagatcagatagttttagataggcagctttatttatgagggctctgttctgttccattgatttatatctctgttttggtaccagtaccatgctgtcttggttactgtaaccttgtagtatagttcgaagtcaggtagcgtgatgcctccagctttgttcttgtggcttaggattgacttggtgatgtgggctcttttttggttccatatgaactttaaagtagttttttccaattctgtgaagaaagtcattggtagcttgatggggatgacattgaatctataaattatgtagggcagtatggccattttcacgatattgattcttcctacccatgagcatggaatgttcttccatttctttgtatcctcttttatttcattgaggagtggtttgtagtctcctnnnnnnnnnnnnnnnnnnnnnnnnnnnnnnnnnnnnnnnnnnnnnnnnnnnnnnnnnnnnnnnnnnnnnnnnnnnnnnnnnnnnnnnnnnnnnnnnnnnnnnnnnnnnnnnnnnnnnnnnnnnnnnnnnnnnnnnnnnnnnnnnnnnnttttgggctaagacaatggggttttctagatatacaatcatgtcatctgcaaacaagcacaatttgacttcctcttttcctaattgaataccctttattcccttctcctgcctgattgccctggccagaagttccaacactatgttgaataggagtggtgagagagggcatccctgtcttgtgccagttttcaaaggaaatgcttccagtttttgcccattcagtatgatattggctgtgggtttgtcataaatagctcttattattttgagatacgtcccatcaatacctaatttattgagttttaagcatgaagtgttgttaaattttgtcaaaggccttttctgcatctattgagataatcatgtggtttttgtctttggttctgtttatatgctgggttacatttattgatttgtgtatattgaaccagccttgcatcccagggatgaagcccacttgatcatggtggatcagctttttgatgtgctgctggattctgtttgccagtattttagtgaggatttttgcatcaatgttcatcgaggatattggtctaaagttttgttttttggttgcgtctctacccggctttggtatcaggatgatgctggcctcataaaatgagttagggaggattccttctttttctattaattggaatagtttcagaaggaatggtaccagctcctccttgtgcctctggtagaattcggctgtgaatccatctgttcctggattctttttggatggtaagctattgattattgccacaatttcagatcctgttattggtctattcagagattcaacttcttcctggtttagtcttgggagagtgtatgtgtcgaggaatgtatccacttcttctagattttctagtttatttgtgtagaaatgtaagtagtagtctctaatggtagttcatatttctgtgggattgatggttatacctgctttatcattttttattgcatctatttgattcttctctcttttcttctttattagtcttgttagcggtctatcaattttgttgatcttttcaaaaaaccagctcctggattcattaattttttgaagggttttttgtgtctctatttctttcagttctgctctgattttagttatctcttgccttctgctagcttttgaatgtgtttgctcttgcttttctagttcttttaattgtgatgttagggtgtcaattttggatctttcctgttttctcttgtgggcatttagtgctataaatttccttcttcacactgctttgaatgtgtcccggagattctggtatgttgtgtcttttttctcgttggtttcaaagaacatctttatttctgccttcatttcgttatgtacccagtagtcattcaggagcaggttgttcagtttccatgtagttgagtggttttgagtgagtttcttaatcctgagttctagtttgattgcactgtggtctgagagacagtttgttataatttctgttcttttacatttgctgaggagggctttacttccagctatgtggtcaattttggaataggtgcagtgtggtgctgaaaaaaatgtatattctgtcgatttggcgtggagagttctgtagatgtctattagatcctcttggtgtagagctgaattcaattcctgggagtacttgttaactgtgtcattggtctgtctaatattgacagtgggatgttaaagtctcccattattaatgtgtgggagtctaagtctctttgtaggtcactcagggcttgctttatgaatctgggccctcctgtattgggtgcacatatatttaggatagttagctcttcttgttgaattgatccctttaccattatgtaatggccttctttgtctcttttggtctttgttggtttaaagtctgttttatcagagactaggattgcaacccctgcctttttttgtttttcatttacttggtagatcttcctccatcgttttattttgagcctatttgtgtctctgcacatgagatgggtttcctgaatacagcacactgatgcgtcttgactcttcatccaaattgccagtctgtgtctttaattagagcatttagtccatttacatttagagttaatattgttatgtgtgaatttgatctgtctttatgatgttagctagttattttgctcgttagttgatgcagtttcttactagccacaatggtctttacaatttggcatgattttgcagtggctggtactggttgtttctttccatgtttagtgcttccttcaggagctcttatagggcaggcctggtggcaacaaaatctctcagcatttgcttgtctgtaaagtattttatttctccttcacttgtgaagcttagtttggctggatatcaaattctgggttgaaaattcttttctttaagaatgttgaatattggcccccactctcttctggcttgtagagtttctgccaagagatcagctgttagtctgatgggcttctctttgagggtaacctggcctttctctctggctgcccttaacattttttccttcatttcaactttggtgaatctgacaattatgtgtcttcgagttgctcttctcgaggagtgtctttttggcattctctgtattttctgaatctgaatgttgtcctgccttgctagattggggaagttctcctggataatatcctgcagagtgttttccaacttagttccaatctccatatcactttcaggtacaccaatcagacatagatatggttttttcacatagtcccatatttcttggaggctttgttcatttctttttattcttttttctctaaacttcccttctcgcttaatttcattcatttcatcttccatcactgataccctttcttccagttgatcacattgtctcctgaggcttctgcattcttcgcatagttctggaaccttggctttcagctccatcagctcctttaagcacttctctgtattggttattttagttatacattcgtctaattttttttcaaagtttttaacttctttgcctttggtttgaatttcctcctgtagctcagagtagtttgatagtctgaagccttcttctcccaacttgtcaaagtcattctccatccagctttgttccattgctggtgaggaactgcattcctttggaggaggagaggcactctgctttttagagtttcccatttttctactctgtttttttctcatctttgtggttttatctacttttggtctttgatgatggtgatgtacagttgggtttttgctgtggatgtcctttctatttgttagttttccttctaacaaacagaccctcagctgcagttctgttggagttttctagaggtccactccagatcctgtttgcctgggtatcagcagcagtgactgcagaacagtggattttcatgaatcacggatgctgctgtctgatctttcctctagaaattttgtctcagaggactactcagccgtgagaggtgtcagtctgaccctactgggttgtgcctctcagttaggctgctcagagttcaggggacagggacccacttgaggaggcagtctgcccattctcagatcccccgctgtgtgctgtgagaaccactgctctcttcaaagctgtcagacagggacatttaagtccacagaggttactgctgtctttttgtttgtctgttccctgcccccagatgtggaacctacagagtcagtcaggcctcctagagctgtgatggtctacacccagttcgagctttccagcagctttgtttacctaagaaagcctgggcaatggggggtgccccaccaccagccttactgccaccttgtagtttgatcacagactgctgtgctagcaatcagtgagacactgtggacataggaccctctgagccatgtgtgggatataatatcctggtgtgccattttttaagcccattgaaaaagtgcagtattagggtgggagtgactcgattttccaggtgccatctgtcacccctttatttgactaggaaagggaactccctgactacttgcacttcccatgtgaggaaatgtctagctctgcttcagaccatgcatagcaccctgcacccagtatcctgtgcccacagtctggcactccttagtgagatgaacctggtatctcagatggaaatgaagaaatcacccatcttctgcattgctcatgatgggaactgtagaacagagctgttcctatttggccatcttgactgctgcctcattcgccagtttgcttctgtgtagttattatgtgaaaatatttccttttccaccataggctgcaaagggctccaaatatccacttgcagattctacaaaaagagagtttcaaaactgctcaatcaaaacataggttcaactctgtgagttgtatgcacacattccaaataaatttctctgaatgcttctgcatagtttttatttgaagatatatccatttccaccataggccacaaagcactccaaatatccacttgcagattctacaaaatgagtgtttcaaaaccgctcaatcaaaagaatggttcaacattgtgagattaaacacacatcacaaagaagtttctcagaatgcttctgtgttgttctcatgtgaagatatttcttttttcaccatagaccttaatgtgatccaaacatccacttgcagatactacaaaaagagtgtttccaaactgctcaatcaaaagaaaggttcaactctgtgggatgaaggcacacatgaccaagacgttcctcagaaatcttttttgtagtttttatgtgaaggtatttccttttccgctataggccataaagggctccaaatatcctcttgcagattctataaaaagagagactcaaaactgctcaatcaaaagatagtttcaactctgtgagtttaatgcacacttagcaaaggtgtttctcagaatgcttctgtgtagtttttatgtgaagatattcccgtttcccccataggcctcaaagcgctccaaatatccacttgcagatactacaaaaataaagtttcaaaactgctgaatgaaaagaaaggttcaacactgtgagatgaatgcacatattgcacagaagtttttcagaatgattctgtgcagtttttatgtgaagatatttccttttccacaataggaatccaagtgctcctaatatcaacttgcagattctacataaagagtttttcaaaactgctcaatcaaaagaaaggttcaactctgtgagacgaatgcacacatcacaaagaggttacttggaatacttctgtgtacgtttcatgtgaagatattttcttttcaacaataggcctcaaagtgctccaattatccacttgtagattctacaaaaagaatgtttcaaaactactaactgaaaagaaagattcatctttgtgagatgaatgcacacatcaccatgaagtttctcagaatgattctgtgtagcttttagttgaagatattcccatgtccaccataggccacaaatggccccaaatatccacttgtagattctacaaaaagagagtttcaaaactgttcaatgaaaagataggttcaactctgtgagttgaatgcacacatcacagagaagcttctcagaaagtttctgtgtagtttttatgtgaagttgtttccttttacccaatagacctcaaagtgttccaaatattcacttgcagatacttcaaaaatattgtttcaaaactgctcaatcaaaagaaaggttcatcttatgagatgaatgcacacatcacaaagaagtttctcagaatacttgtgtctgttttttatgtgaaggcatttccttttccacaacagaccacaaaaggctgtaaatatccacttgcagatactacaaaaagagagtttcaaaatggcttaatcaaaagatatgttcaactctgtgagttgaatgcacagattgcaaaggagtttctcagaatatttctgtctagttttcatgtgaaggcatttccttttcccccataggcctcaaatggttccaaacttacacctgcagatactacaaaaagagagatccaaaactgctcatcaaaagattgattcacatctgtgagttgaatgcacacaacacaaagaaaattctcagaatgcttctgtgtggtctttaagtgaagatatttccttttccacaataggcctcaaagcgctccaaatatgtacttgcagattatacaacaagagtgtttcaatactgctcattcaaaaaaaaggtacagctctgtgagatgaatgcatacatcacaaagaagtttctcagaatgattctgtgtagattttatgtgaagatatctcgttttccaaaataggcctcaaagccctccaaatatccacttgcagattctacaaagagagtgtttcaaaactactcaatcaaaagaaaggttcatctctgtgagttgaatacacacatcataaagaagtttctcggaatgcttctgtgtagtctttacatgaagatatgtcctattccaccgtaggtctctaagcactccaaatatcctcttgcagaatctacaaaaaaagtgtcacaaaactgctcaatcaaaagcaagttcaactctttgagatgaaagcacatatcacaaaaatgtttctcagaatgcttctgtgtagtttttatgtgaaatatttgattttccagagtaggcctcaaatcgctcctaatatccacttgcagattctgcaaaaactgtgtttaataactgtacaaccaaaagaaattttcaactctgtgagatgaaaacacacaacgcaaagacgcttttcagaatgcttctgtgtagtttttatgtgaagatattgccttttagacaataagcttcaaagcgctccaagtaaccacttgcagattctacaaaaaaagggtttcaaaactgctcaatccaaagagaggttcaactctgtgagatgaatgcacacatcacaaagaagtttctcagactgctcctgtgtagttttttttttttgaagatatttccgtttccaccataggccacaaaggactccaaatatccagttgcagattcttcaaaaagagagattcaaaactactcaatcaaaaaataggttgaaatctgtgagttgaatgtacacatcacaaagaattttctcagaatgctactgtatagtttttacgtgaagacatttcctttttcaaaacaggcctcaaagccctccaaatatccacttgcagattctacaaaaagtgtgtttcaaaactgctcaatcaaaagatacgttcaatctgtgtgatgaatgcactcatcaaaaagtagtctctcagaattcttctgtgaaatttttatgtgaagatatttccttttccacaataggcctcaaagtgctccaaatatccactttcagattctacaaaaagagagattcaaaactgctcaaacaaaacgtaggttacactctgtgagttgaattcacaattcacaaagtagtttctcagaaagcttctgtgaaatttttatgtgaagatatttccttttccacaatagacctcaaagcactgcaaatatccattttcggattgtacaaaaagagagattcaaaactactcaaacaaaacctaggttaaactctgtgagttgaattcacaattcatgaagaagtttatcagaatgctactgtgtagtttttacttgaagattttttttgcacaatatgcatcaaagttctccaaatatccaaatgcagattctataaaaagactgtttcaaaactgctcaatcaaaagaaaagtttaactctgtgagatgaatgcacacatcacaaagaagtttctcagaatgcttctgtgtggtctttaagtgaagatattttcttttaaagagtaggcctcatgagctccaaatatccacttgcagattctacaaaaagagggtttcaaaactgctcaatcataaaataggttcaaacatgtgagttgaacgcacacatcacacagaagtttctcagaatgcttctgtgtagtttttatgtgaagatagttctttttccacaataggcctcaaagagctccaaatatccacttgcagatgctacaaaaagagtgtttcaaaactgctcaatcaaaagaaagattcatctctgtaaggtgaatgcaaatatcacaatgtagtttctgagaatgcttctgtgtaccttttacgtgaagatatttccttttccacaataggcctcaaaccgctccaaatatccacttacacattctacaaaaagagtatttcacaactgctcaatcataagataggttcaactctgtgagatgaatgcacacatcacaaataagtttctcagaatgcttctgtgtagtttttatttgaagacatttccttttccaccacagaccacaaattgctccagatatccacttgcagattctataaaaagagagattcaaaactgatcaatcataagataggttcaactctgtgagatgtatgcacacttcacaaagaagtttctcagaattcttccttgtagtttttatgtgaagatatttccttttccacaataggcctcaaaacgccccaaatatccacttgcagattctacaactagagtgtttcaaaactactaaatcataagatagtttcaaatctgtgagatgaatgcacacatcacaaataagtttatcagaatacttctgtgtagtttttacgttaagatatttcgttttccacaataggcctcaaagcactccaaatatccacttgcagattctacaaaaagattgtttcaatactgctcaatcataagacaggttcagctgtgtgagatgaatgcagacatcacaaagaagtttctcagaatgcttctgtgaagtttttatgtgaagatatttgcttttccacagtagacctcaaagtgctctaaatatgcacttgaagattctacaaaaacagtgttccaaaactgctgaatcataaaataggttcaactctgtgatttgaatgcacacatcgcaaagaaattcctcagaatgcttctgggtagtttttatttgaagatatttcctttacctccataggccgcaaagggctccaaatgtccacttgcagatcctaccaaaagagggaaagaaaactgttcaatgaaaatataggttcaactctgtgagtttaatgcacatatcagcaagtagtttctcagaatgcttctgtgtagtttttatgtgaagacattacctttttcacaataggccacatgggctccaaatatacacttgcactttctacaaaaagagtgtttcaaaactgctcaatcataagacaggttaaacattgtgagatgaaagcacacatcacaaagaagtttctcagaatacttctgtgtagttctcatgtgaagatatttccttttccaccataggcctcaaagcgatccaaacttccacttgtagatactacaaaaagagtgtttccaaactgctcaatcaaaagaaagtttcaactctgtgagatgaaggcacacatgaccaagacgttcctcagaaatcttttttgcagtttttatgggaaggtatttccttttccaccataggccacaaagggctccaaatatcctcttgcagtttctacaaaaagagagattcaaaactgctcaatcaaaagatagtttctactctgtgtgtttaatgcacacttaacaaagttgtttctcagaatgcttctgtgtgctttctatgtgaagatattcccatttccactataggcctcaaagcactccaaatatccacttgcagattctacaaaaataaagtttcaaaactgctgaatgaaaagaaaggttcaacactgtgagatgaatgcacatatcgcacagaagtttctcagaatgattctgtgcagtttttatgtgaagatatttccttttccacaataggaatctaagtgctacaaatatcaacttgcagattgtagagaaagagtgtttcaaaactgctcaatcaaaagaaagtttcaactcagtgtgatgaatgcacacattgcaaagaggtttctcggaatacttctgtgtagatttcatgtgaagatattttcttttcaacaataggcctcaaagcactccaattatccacttgcagattctacaaaagagtgtttcaaaactgcacaatgaaaagaaagattcatctctgtaagatgaatgcacacatcaccatgaagtttctcagaatgtttctatgtagtttttagttgaagatattcccatttccaccatacgctgcaaatggctctaaatatccacttgcagattctacaaaaagagagtttcaaaattgttcaatgaaaagacaggttcaactccatgagttgaatgcatgcatcacagagaagtttctcagaaagcttctgtgtagtttttatgtgaagatatttcctttaacacaacaggcctcaaggtgcttcaaatattcacttacagatacttcaaaaagattgtttcaaaactgctcaatgaaaagaaaggttcatctctgtgagatgaatgcacacatcacaaagaagtttctcagaaaaattctttgtgttttttatgtgaagccatttcctttttcacaataggccacaaaaggctccaaatatccacttgcagatactataaaaagagagtttcaaagtggctcaatcaaaagataggttcaactctgtgagttcaatgcacatatcacaaaggagtttctcagaatacttctttctagttttcctgtgaaggcatttccttttccaccataggcctcaaaggctccaaatatacacctgcagatactacaaaagagagtttcagaactgctcatcaaaagatagattcacatctgtgagttgaatgcacacatcacaaggtagtttctcagaatgcttctgtgtagtttttatgtgaagatatttcattttccacaataggcctcaaagcgtttcaaatatccacttgcagattatgcaaaaacagtgtttcaaaactgttcaatccaaaaaagtttccactccgtgagatgaatgcacatatccaaagaagtttctcagaatgattctgtgtagtttttatgtgaagatatttcgttttccaaaataggcctcaaaacagtccaaatatccacttgcagatgctacaaagagagtgtttcaaaactgctcaaacaaaaaaaaggttcaactatgtgagataattgcacacatcacaaagaagtttctcagaatgctcctgtgtagttttaatgtgaatatatttgttgttcaactgttggcctcaaagctctccaaatatccacttgcatattctacaaatacagtgtttcaaaactactcaatcaaaagaaaggttcaactctgtgagttgaatacacacatcaaacagaagtttctcagaattcttatgtgtagtttttatgtgaagatatttcctattccactgtaggcctcaatgctctccaaatatcctcttgcagattctacaaagagtgttacaaaactgctcaatcaaaagaaagttcaactccttgagatgaatgcacacatcaaaaagaagtttctcagaatgcttctgtgtagtttttatgtgaagatatttgcttttcctgagtaggcttaatatccacttgcagattctgcaaaaactgtatttcataactgctcaatcaaaagaaagtttcaactcggtaaaatgaaagcacacaacacaaagacgcttctcagaatgcttctgtgtagtttttatgtgaagatattttcttttagaccacaagcctcaaagtgctccaaataaccacttgcagattctaaaaaaagagagcttcaaaactgctcaatccaaagagagattcaactctgtgagatgaacgcacacatcacaaagaagtttctcagactgcttctgtgtagttttttttgaagatatttccatttccaccataggccgcaaaggaatccaaatatcctattgcagaatctacaaaaagagagattcaaaactgctcaatcaaaaaataggttcaactctgtgagttgaatgtacacatcacaaagaattttctcagaatgcttctgtgtagtttttacgtgaagatatttcctttttcaaaacaggcctcaaagccctccaaatatccacttgcagattctacaaaaagtgtgtttcaaaactgctcaatcaaaagacagtttcatcctgtgtgacgaatgcactcatcacaaagtagtctctcagaatgcttctgtgaaatttttatgcgaagaaattcccttttccacaataggcctcaaagtgctccaaatatccactttcagattctacaaaaagagagattcaaaactgctcaaacaaaacatatgttaaactctgtgagtggaattcacagttcacaaagaagtttatcacaatgctactgtgtagtttttatttgaatatatttgcttttccacaatatgcatcaaagttctccaaatatctaaatgcagattctacaaaaagagtgtttcaaaactgctcatcaaaagattgattcacatctgtgagatgaatgcacacatcaaaaagaagtttctcagaatgcttctgtgtggtctttaagtgaagatattttcttttaaagagtggacgtcaatgagctccaaatatccacctgctgtttctacaaaaaagtgtttcaaaactgctcaatcataaaataggttcaaccctgtgagatgaatgcacacatcacaaagaagtttctcagaatgcttttgtgtagtttttatgtgaagatatttccttttccacaataggcctcaaaagcccccaaatatccacttgcagattctacaaaaagattgtttcaatactgctcaatcataagacaggttcaactgtgtgagatgaatgcagacagcacaaagatttttctcagaatgcttctgtgaagtttttatgtgaagatatttgcttttccacagtaggcctcaaagcgctccaaatatccacttgaagatactacaaaaacagtgtttcaaaactgctgaatcataaaataggttcaactatgtgagttgaatggacacatagcaaaggagttcctcagaatgcttctgggtagttttaatttgaagatatttccttttcctccataggctgcaaagggttccaaatgtccacttgcagatcctgcaaaaagagggaatcaaaactgctcaatgaaaagataggttcacctctgtgggattaatgcacatatcacaaagtagtttctcagaatgcttctgtgtagtttttatatggaggtattttctttttcacaataggccacatgggctccaaatacacacttgcactttctacaaaaagagtgtttcaaaactgctcaatcataagatagtttcaacattgtgagatgaaagcacacatcacaaagaagtttctcagaatgcttctgtgtagttttcattgaagatatttccttttccaccttaggctgcaaagggctccaaatatccgcttgcagattctataaaaagagagattcaaaactgatcaataataagataagttcaaccctgtgaatcgtatgcacacatcagaaagaagattctcagaaatcttttttgtactttttatgtgaagatatttctttttccacaatatgcatcaaagtgctccaaatatccaattgcagattgtacagaaagagtgtttcaaaactgcccaatcaaaagaaattttaaactttgtgagatgaaggaacacctcacaaagaagtttctcagaatgcctctgttttattttaagatatttccttttcctccatagcccgcaaaaggctccaaatatccactggcagattctgcaaaaagagtgattcaaaactgctaaatcaaaagatagcttcaactctttgaattcaatgcacacatcagaaagaagtttctcagaattctttggtgtagtttttatatgaagatatttcgttttccacgataggctgcaaagggttcaaaatactgacttgcagattctacaaaaacagagattcaaaactgctcaatcaaaacatatgttcaactctgtgtgttgaaggcatgcattacagagaagtttcaaagaatgcttctgtgtagtttttatgtgaagttatatccttttccacaataagccacaaagcgctccaaatatccactagcagattctacaaaaactacaaaaacggtgtttcaataaatgcccaatcataagataggatcaactctgtgtgatgaatacactcatcacatattagtttctcacaatggctctgtgtagtttttttgtgaagacattttcttttccacagtagatctgaaagtgctccaaatatccacttgctgattctacaaaaacagtgtttcaaaattactcagtcaaaagaaagtttcgactctgtgagatgaattcacatattataaagaagtttctcagagtgtttctgtgtagtttttatgtgaagatatttccttttcgacaaaaggcatcaaagctctccaagaatccacttgtagattctagaaagagagtgtaacaaaactgctcattcataagataagttcaacaccgtgagatgaatgtacacatctttgaagtttcccagaattcttctgtgtagtttatatttgaagatatttccttttaccccatgggccgcaagggctccaaatatccactttcagatactaaaaaaagagagattcaaaactgctcaatcaaaagataggttcaactgtgtgagttgaatgcagatcacaaagtagtttctcagaatgcctctgtgcagtttttatgtgaagatatttccttttccacaataggcctcaaagcactccaaatatccatttgcagactctataaaaagactgtttcaaaactgctcaatcaaaagaaatgttcaactctgtgagatgaatgcacacatctcaaagaagtttctcagaatgcctctgtgtagtttttatgtgaagatattttctttttcagagtaggcctcaattgctccaaatatccacttgcagacactacaaaaacactgtttcaaaactgctcaatcaaaagaaatgttcaactctgtgagaggaatggacatatcacagggaagtttcccagaaagcttctgtgtagtttttatgtgaagatatttccttttccacagtaaacctcataatgctccaagtatccacttacagattctacaaagagagagtttcaaaactgctcaatcaaaacataggttcaactctgtgagatgaatgcacagatcaggaagaagtttctctgaatgcttctgtgtaccttttctttgaagatatttcctttttattcataggccacaaagggcaccaaatattcagttgcagattctacgaagagagattcaatactgctcaatgaaaagataggttcaactatgtgagttgaatgcacacatcacgaagacgtttctcagaatgcctcagtgtagttcttacgtgaagatatttgtttttccacagtaggcctcaaagcactccgaatatccacttgcagattctatgaaaacagcgtttcaaaactgcccaatcaaaagaaaatttcaacactgtgagatgaatgcacacatcacaaagtagtttctcagaatgcttctgtgtagtttttgtgtgaagatattttgttttccacaataggccacaaagcgctccaaatatctacttgcagattctacgaaaacagcatttcaaaactgctcaatcaaaagaaaatttcaactctgagatgagttcacacatctcaaagaaatttctcacaattcctccgtgtagagtttatttaaatacatttcattttccaccataggccgataaggtctctcaatatccggttgaagattctacgaaaagattcaaacctgatccatcaagagattggttcaactctgtgagttgaatgcacatatcacaaagatgtttctcagaatgcttctgtgtagtctttatgtgaagatatttccttttccacaataggcctcaaagccctccaaatatccacctgcagattctacaaaaagagcgtttcaaatctgctcaatcaaaaaaatgttaaaatctgtgtgatgaatgtacacatcataaagaagtttctcagaatgcctacgtgtagtttttacgtgaagatatttccttttctgcaataggcctcaaagctgtccaaatatccacttgcagattctacaaaaagagtttttcaaaactgctctatcaaaagatagtttcaacactgtgagttgaatgtacacatcacaaagaagtttctcagaatgcatctgtgtagttttgatgtgaagatatttccttttacaaaatagtcctcaaagtcccccaaatatcaacttgcagtttctacataaagagtgttacaaaactgttcaatcaaaaggaaatgttcaactctgtgtgatgaatgcactcataacgaagaagtttctcagaatgcttctgtgtagtttttatatgaagatatttccttttccacaatagacctaaaagcgcaccaaatataaacttgcagattctacaaaaagagtgactcaaaactgttcaatcaaaagatacgttgaactctgagttgaatgcacacatcaaaaaaagtttctcagaatgcttctgtgtaattgttatgtgaaaatatttccttttccacaataggcctcaaagctctctaaatatccacttgcagattctgcagaaagagagattcagaactgcaccatcaaatataggttcgattccgtgagttgaatgcacatatcacaaagaagtttctcacaatgcttctgtgtagtttttatgtgaagatgtttccttttccgcaattggcctcaagggtctcccaatagccacttgcacatacttcaaaaggagagattcaaaactgatcaatcaaaacataggtttgagtccgtgagttgcatgaacgcctcacgaagaagttgctgagaatgcttctgtgtagtttttatgtgaagatatttccttttccaaaagaggcctcaaagccctccaaatatccacttccagattctacaaaaagagtgtttcaaaactgctcaatcaaaagaaaagttcaaatctgtgtgatgaatgcactcatcacaaagaagtttctctgaatccttctgtgtagtttgtatttgaagatatttccttttccaccttagggcacaaagggctccaaatatccacttgcagattctacagaaagagagattaaaaacttctcaatcaaaagatacgttcaacactgtgagttgaatgtactcatcacaacgaagtttctcagaatgcttctgtgtagtttttatatgaagatatttccgtttccacaataggcctcaaagtgctccaaatacccacttgcagattctacaaagagtgtttcaaaactgctctatcaaaagaaatgtttaactctgtgacatgaatgcacacatcacaaagaattttctcagattgcttctgcctagattttatatgaagatatttcctcttctaaaataggccacaaagcactccaaatatccacttgcagattctacacaaagaatgtttccaaactgctgaatcaaaagaaaagttcaactccgtgagatgaacgaacgcatcacaaagtgtttctctgagttttctgtctagtttttatgtgaagatatttccttttccaccataggcctgaaagcactccaaatgtccacttgcaaattctacaaaaagagagtttcaaaactgcttaaacaaaagaatgtttaaactctgtgagatgaatgcacacatcacaaagaagtttctcagattgcttctgtctagattttatgtgaaaacatttccttttctaccataggccgcaaagcactccaaatgtccacttgcatattctacaaaaataatgtttccaaactgctcaatcaaaataaaggttctacactgtaagatgaacgcacacatctcaaagaagtttctcagaattctgtctagtttctatgtgaagatattcccttttccgccatagtcttcaaagcgctccaaatgtccagttgcagattctgcaaaaagagttacaaaactgctcaatcaaaagaaaggtttaactctgtgagatgaatgtacacatcataaagaagtttttcagattccttctgtctggattttatgtgaagatatttcctattctaccaatggccataaagtgctccaaatgtgcacgtgcagattctacaaaaagggtgtttccaaactgctcaatcaaaagagaagtacaactccgtgaggtgaacacacacatcacagagaagtttgtcataattcttctgtgtagttttaaactgaagatatttccttttccaccataggcctcaaaacactccaaatgtccaattgtagaatctacaaaaagagagtttccaaactgctcaatcaaactaaagtttcaactctctggaatgaatgcacacatcacaaagaagtgtctcagaattcttctgtctagtttatatgtgaagatatttacttttacaccataggactcaaagcactacaaatgtccacttgaagactccacgaaaagaatgtttccaaaatgctgaatcaaatgagatgttcaactctgtgagatgaacgcacacatcataaagaagtttctcagaattcttctgtctagtttttatgtgaagatacttcctttttttccataggaatcaaaggtcttcaaatgtccctttgcaaattctacaaatagaaagtttcaaaactgctcaatcaacagaaaggtttaattctgtaagactaatgtacacatcacaaagaagtttctcacattgcttctttcttgattttatgtgaagatatttccttttctaccataggctgcaaagcactccaattgcagattctacaaaaaaagagtttgaaaacagttctataaaaaagaaagctttaaatctgtgagatgaatgcatacatcacaatgcagtttatcagattccttgtgtctagattttatgtgaagatatttcctttcctgtgataggccgcaaagcactccaaatgtccacttgcatattctacaaaaagagggttttcaaactgctcaatctaaagaaaggttcaactctgtgagatgaacacacacatcacaaagaagtctgtcagaattctcctgtctagtttttatttgaagatattaccttttccagcataggcctcaaagcgatccaaatgcccacttgcagattttacaaaaacagagtttcaaaactgctcaataaaaagaaaggtttaactctgggagatgaatacacacatcacaaagaagtttctcagattgcttctgtctagattttatctgaagatattttcttttctattagaggctgcaaagtgctccacatatccacttgcagattcaacaaaaagagtttttccaaacagctttatcaaaagaaacgttcaactctgtgagatgaatgcacacatcacaaaaaagtttctcagaattcttctgtttagtttttatgttccttttccaccataggcctcaaagtgctacaaatgtccacttgcagattgtacaaaatgagtgtttccaaactgctcaaccaaaagaaagtttaaactctgtgagatgaatgaacacatcacaaagaagtttctcagaaatcttctatctattttttatataaagatatttgcttttctaccataggccacaaatagctccaaatgtccacttgcaaattctacaaaaagagagtttaaaaactgctcaatcaaaagaaaggttaaactgtgtgacatgaaggcacacaacacaaagaagtttctcagattgcttctgtctagattttatgagaagatattttcttttctactacaggccacaaactgtccaaatttctcctgcagattctaaaaaaagtgtttccaaactgctcaatcaaaagaaagtttcaaatcagtgaggtgaagcacacatcacaaagaaatttttcagaattcttctgtcttgtttttatgtgaagatatttcctgttccaccataggcctcaaaatgctgcaaatgtctaattgcagattctacattaatagagtttcaaaattgctcaaccaaaaggaaggtttaattttgtgaggtgaatgcacacatcacaaagaagtttctcagattgcttctgtctagattttatgagaagatatttccttttctaccataggcagcaaagcgctccaaatgtccactagcagattctacaaaaagagtgttttcaaactgctcaatcaaaaaaaaaggttcaactctgtgagatgaacgcacctatcacaaagaagtttctcacaattcttctgtctaatttttttgcgaagatatttccttttccaccatacgcaacaaagcgtgccaaatgtccacttgcagattccagcaaaagagagatacaaaactgctcaatcagaagaaaggtttaactctgtgagatgaattcacacatcacaaaatagtttctcatattgcttctgtctatatttcatgtgaagatgttaccttttctaccacaggccacaaagcgctccaaatgtccacttgcatattttacaaaaagagtgattccaaacttatcaatcaaaaaaatgttcaaatctgtgagatgaatgcacacactacaaagaagttctcggaattcttccatctagtttttgtgggaaattatttccttttccatcacaggcttcaaagcgctacaaatgtacacttgcagattctacaaaagggagtttctaaactgcccaatgaaaaggaagttttaactctgtgagatgaatgcacacatcacaaagaagtttctgaggctgcttctgtctagggttcatgtgaaaatacttccttttgtaccataggccacaaagcgctccaaatgtgcacttgaagattctacattaagtgtgtttccaaactgctcaatcaaaagaaaggttcaactctgtgaaacgaatgcacacatcacaaagaagtttgtcggaattcttctgtctagtttttatgtgaatacatatccttttctaccataggctgcaaagtgctccaaaagtccacttgcagattctaccaaaagtgtgtttacaaattgctcaatcaaacgaaaggttcaactctgtgagatgaacgcacacatcacaaaaaagtttctcagaattcttctgtatagtttttatgtgaagatatttccttttccaccataagcatcaaagagctccaaatattgacttgcagattccacaaaaagagagtttaaaaactgctcaatcagaagaaaggttaaagacagtgagatgaatgtacacaacataaagaagtttctcagattacttctgtctagattttatgtgaagatatttccttttataccatataccacaaagcgctccaaatgtccaattgcagattctacaaaaagactgattccaaactgttcaatcaaaacaaaggttcaaaactgtgagatgaatgcacacaccacaaagaagtttctcagaattcttccgtctagtttttatgtgaagatattactttttccaccataggcctcaaagtgctccaaatgtacatgtgcagattctacaaaaagagagtttcaaaactgctctatcaaaagaagcatttcagtctgtgaaatgaatgtatacattacaaagaagttttccagattgcttctgtctagattttatgtgaacatatttccttttcaaccatacactgcaaagcggtccaaatgtccacttgcagattgtacaaaatgagtgtttccaaactgctcaaccaaaagaaagtttaaactctgtgagatgaatgaacacatcacaaagaagtttctcagaaatcttctatctagtttttatataaagatatttgcttttctaccataggccacaaatagctccaaatgtccacgtgcaaattctacaaaaagagaggttcaaaactgctcaaacaaaagaaaggtttaactctgtgaaataaatgcacacatcacaaagaactttctcagattgcatccatctagattttatgtaaagatattttctttcctaccactgactgcatagcgctccaaatgtccacttggagattcttcaaaaagagtgtttccaaactgctcaatcaaaagaaaggtttaactcggtgagatgaatgcacacatcacaaaaaagtttctcagaattcttctgtctagcatttatgtgaagatatttcattttccagtataagtttcaaggtgctcgaaatgtccacttgcagattacacaaaaattatatttcaaaattggtccatccaaagaaaggttcaactctgggagataaatgcactcataacaaataagtttctcagaatgcttctatctagtttttatgtgaacacatttccttttccaccattgccctcaaatccctccaaatgtccacttgcagattctacaaaagaaagtttcaaaactgctcaatcaaaagaaagggttaactctcagatgaatgcagacatcacaatgaattttatcagattgcttctttctagattttatgtgaagatatttccgtttctaccagaggccgcaaagcactgcaatgtccacatgcagagtctacaaaaagggtgtttccaaactgcttaatcaaaagaaaggttcaactctgtgagatgagtgcacacatcatgaagaagtttctctgaattcttctatctagtttttatgtgaagacatttctttttagaccataggcctcaaagggctccaaatgtccaattgcagattctacaaaaagagagtttcaaaacttctgagtcaaaacaaacgtttaagtttgtgagatgaatgcacacatcacaaagaagtttctcagattgcttctgtctagattttacgtgaagatatttccctttctaccatagacctcaaagcgctccagatgcccacctgcagattctacaaaaagtgtgcttccaaactgctcgatcaaaagaaaggttcaggtatgtgagatgaacgcacacatcacaaagaagtttctcagaataattttgtctagtttttatgtgaagatattttcttttccaccacagacctaagagtgctacaaatgtccaattgcagatctacaaaaagagagtttcaaaactgctcaaccaaaagaaagtttatctctgtgatatgaatgcacacaccacaaagtattttctcagattgcctctatccagattttatgtgaagacatttccttttctaccataggccgcaaagcgctccaaatccctagttacagattctatagaaagtgtttccaaaatgttcaatcacaaaaaatgttcagctctgtgagatgaaagcacatatcaaaaagaagtgtcacagaattcttctgtctagtttttatgtgaaaatatttccttttccatcacaggacagaaagcactccaaatgtccaattctagattatacaaaaagagagtttcaaaactgcccaatcaaaagagagttttaactctgtgagatgaatgcacacatccaaagaagtttctcagattccttctgtctacattttatgtgaagatatttccttttctaccataggcctcaaagtgctccaaatgtccacttgaagattcttcaaaaacagtgtttccaaactgctcaatcaaaagaaaggttcaattctgtgaggtgaatgcacacatcccaaagaagtttctcagaattcttctgtctagtttgtatgtgaagatatttcattttccaccacaggcctcaaggagctcaaaatatccacttgcagattccacaaaaagactatttcaaaactggtccattaaaaggaagtgtcaaatctgggagatgaatgcacacatcacaaagaagttcctcagaatggttttatctaatttttatatgaagatatttccttttccaccaaagccttcaaagcactccaaatgtccattgtagattctataaaaaagagattttcaaaactgctcaatcaaaagacaggtttaactctgtgagatgaatgcacatatcacaaataagtttctgagattgcttctgtctagattttatctgaagatatttcatttctactgtaggcctcaaagcactccaaattcccacttgcagattccaaaaagagtgcttccaaactgctcaatcaaaagaaagttcaactctgtgtgatgaacacacccatcacaaaatattttctcagaattcttctgtctagttttttgtgaagatatttcctataccaccgtaggcctcaaagtgctccaaatgtcaacttgcagatcctacaaaaagactgtttccaaactactcaatcaaaagaaagtttcaactctgtgagatgaaagtacaaatcacaaagaagtttctcaaaattcttctatctagcttttatgggaagatatttccttttccaccataggcctcaaagctctgaaaatgtccacttgcagattctacaaaaagagagtttcaaaattgctcaatcaaaagtaagttttaactctgtgagatgaatgcacacataacaaagaagtttatcagattgctcctgtaaagatttaatttgaacatatttccttttctaccatagccctaaagcactccaaatgtccacttgcaggttctacaaaaagagtgtttccaaaatgctcaatcaaaagaaaggttcaactctgtgagaggaatgcacgcatcacaaataagtttctcagaattcttctgtctagtttttatgtgtagatatttccttttgcaccatagggctcaaagggctccagtagtccccatgcagattctacaaaaaaagagtttcaaactgctcaataaaaagaaaggtttaactctgagagatgaatgcacacatcacaaagaagtttctcagattctttctctctagattttatgtgaagatatttccttttctgccataggccgcaaagcgctgcaaatgtccagtttcagattttacaaaaagaatgtttccatactgctcaatcaaaagaaaggttcaactctgtgagatgaatgcacacaacacaaagacatttctcagaatttttctgcctagtttttaatgtgaagatatttcattttccaccataggcctcaaagcgctccaaatgtccacttgcagattctacaaaaagagagtttcaaaactgctcaatcaaaaggaagtgttaactctgtgagatgaatgcacccataaaaaagaagtttctcagattacttctgtctagattttatgtgaagatatttccttttctaccataggctgcaaagcgctccaatatccacttgcagattcttcaaaaagagatttgcaaaactgttcaatcaaaagaaagcgttaactctgtgagattaatgcacacatcacaaaaaagtttctcagatggcttctgtctagattttatgtgaagatatttccttttctaccataggccgcaaagcactccaaatgccctcttgcagattctacaaaaagagtgtttccaaactacttaatcaaaagaaatgttcaattctgtaagatgaatgcatgcttcacaaataaatttctcataattcttctgtctagttttcatgtgaaaatatttccttttccaccatagggctcaaggcgcttgaaatgtccacttgcaggttctacaaaaagcatatttcaaaactcgtctttcaaaagaaaggttcaactctaggagatgaaaaaacacatggcaaagaagtttttcagaatgttcctacctagtatttatgtgaagatatttccttttccaccataggcatcaaagtgctccaaatgtccacttgcaacatctactaaaggagggtttcaaaactactcgacaaaagaatgttttaactctgtgagatgaatgcacacatcataaagaagtatctcagattgtttctttctagattttatgtgaaaatatttccttttctaacttaggccacaaagtcctccaaatgaccacttgcagattctacaaaaagagtgtttccaaactgctcaatcaaaagaaacattcacttctgtgagatgaacgcacacaacacaaagatgtttctcagagttcttctgtctagtttttatgtgaagatatttccttttccacaattgtcctcaaagcactccaaatgtccacttgcagactctacaaaaagagagtttcaaaagtgctcaatcaaagcaaaggtttaactctgtaagatgaatgctcacatcacaaagaagtttctcagattgcttctgtctagattttatgtgacaatatttccttgtctaccatagtccacagagagcacgaaatgtcctcttgcagattctactaagagtctttccaaactgttcaatcaaaggaaaggttaaactatgtgagatgaatgcacacatcactaagaagtttctaagattgcttctgtctagattttatgtgaagatatttctttttctaccaaaggcagcaaagtgcaccaaatagccacttgcagattctgcaaaaagagtgtttccaaactgctcaatcaaaagaaaagttcagctccgtgagaagaatgcacacatcacaatgtagatccacaaaattcttctgtctggtttttatataaacatattttgttttccgccataggcttcaaagcgttccaaatgtccacttgcagactctacaaaaagagagattcaaaactgctcaattaaataaaggtttaattttgtaagatgcatgcatacatcacaaagaagtttctcagattgcttctgtctacattttaggtgaagatatttccttttccaccagaggaagcaaagcgttccaaatgtccacttgcagattctacaaaaaagagtgtttccaaactgctcaatcaaaagaagggttcaattctgtgagatgaatgcacacatcacactgaagtttctcagaattcttctgtctagtttttatgtgaagatatttccttctccaccataggcttcaaaccgctccaagtgtccacttgcacattctacaaaaagagagtttcaaaactgccctattaaaaaataggtttaactctgtgagatgaatgcacatagcacaaagtattttctcagattgcttctgtctagactttaagtgaagatgtttccttttttaccataggcagaaaagcgtcccaaatgtccacttgcagattgtacaaaaagactgctcaatcaaaagaaagggttcactctgtcagatgaatgcacacatcacaaagaagtttctcagattgcttctgtctatattttatgtgaagatatttccttttctaccataggccataaagcgctccaaatgttcacctgcagattctacaaaaagggtgtttctaaagtgctcaatccaaagaaaggttcaaatatgtgagacaaacgcacacatcacaaacaagtttctcagaatgcttctatatattttttatatgaagatatttccttttctaccataggacacaaagcgctctgaatgtccacttgaagattctacaaaaacagtgtttccaaactgctcaatcaaaagaaagattcaactctgtaagatgaaccagacgtcctgatcaagtgtcacagaattcttctgtctagtttttatgtgaatatatttccttttccaccttaggtctcaaattgctccaaatgtccatttgcagattctacaaaaataaagtttcaaaactgctccatcaaaagaaaggtttaacactgtgggatgaatgcacacatcacaaagaagtttctcagattgcttctctctagattttatatgaaggtatttccttttctaccgaaagcctcaaagtgcaacaaatgtccaaccgcagattctacaaaaagagtgtttccaaacggctcaatcaaaagaaagcttcaattgagtgagatgaacacacacatcacaaataagtttctcagaatacttctctctagtttctatgtgaggatgtttccttttccaccagaggcctaaaagcactccaaatgaccacttgcagaatctacaaaaagagtgtttcaaaactgctcaatcaaaaaaatgttcaacactatgtgatgaatgcactcatcacaaagaagtttctatgaatatttctgtgtagttttatttgaagatatttcctattccaccatagggcaaaaagagctgcaaatatccacttgcagattctacaaaaagggacattcaaaactgctcaatcagaagataggttcaactctgtgagttgaatgctcacatcacaaagaagtttctcagcctgcttctgagtaatttttatgtgaagaaatctccttttccacaataggcctcaaatcgttgcaaatatcctcttgcagattctacaaaaagagtgtttcaaaactgctcaatcaaaaaaaaggttcaactctgtcagatggatgcacacatcacaaagaattcctcagaatgcttctgtgtagtttttatgtgaagatattttcttttccactgtaggccacatagcgctccaaatatccacttgcagattctacaaatggagagattcaaaactgttcaatcaaaagataggttcaacttcgtgagttgaatgcacacatcacaaataagttgctcagaatgcttctgtatagttttaatgtgaagatatttccttttccacattagtcctcaaagctctccaaatatccacttgtagattctgcaaaaagagagattcaaaacttctcaatcaaaatacaggttcaactccgtgatttgaatgcacacatcacaaagaagtttctcagaatgcttctgtgtagtttttatgtgaagatatttcattttccacaataggcctcaaatcactccaaatatccacttgcagattctacagaaagcgtgtttcaaaaatgctcaatcaaaagaaaatttcaactctgtgagatgaatgcacacatcaccaagaagtttctcagaatgcttctgtgtagtttttatgtgaagatatttgcttttccacagtcagcctgaaaacgctcccagtatccacttgtagatcccacaaaagcagtgtttcaaaagtactcaatcaaaagaaaggatcaaccctggcagatgaaggcactcacgacaaagaaggttctcagaatgcttctgcgtagtttttatgtgaagatatttccttttccacaataggcttcaaattgcttcaaatatccacttgcagattctacaaaaagagtgtttcaaaactgctcaatcaaaagaaactttcagttctctgagatgaatgcacacatcacaaagaagtttctcagaatgcatctgtctagttattatatgaagatattttgttatccaccaaaggcctcaaagcgcttcaaaggtccacttgcagattccacaaaaagagtattacaaaactgctgaatgcaaagtagggttcaactcagtgggatgaatacacacatcacaaagtagtttctcagaatgcatctgtctagttattatatgaagatattttgttatccaccaaaggcctcaaagcgcttcaaaggtccacttgcagattccacaaaaagagtattacaaaactgctgaatgcaaagtagggttcaactcagtgggatgaatacatacatcacaaagccgtttgtcagaacttttctgtctggtttttatatgaacatatttttttttccagcatagacctcaaagcgcttcaaatgtccacttgcagattctacaaaaagagagtttcaaaactgcttaatcaaaagaaaggtttaactctgtaagatgaatgcacacaacataaaaaagttgctcagtttgcttctgtctagattttatgtgaagatatttccttttcttccataggccacaaagcactccaaatgtccacttgcagattccacaaaaacagtgtttccaaactgctcaatcaaaaagaattgttctactttgtgagatgaatgcacacttcacaaagatgtttgtcagaattcttctgtctagtttttatgtgaagatatttccttttccaccataggcctcaaagcactccaaatgtccacttgcagattctacaaaaagagagtttcaaaactgctctatcaaaagaaaggtttaattctgtgacatgaatgcagacatcacaaataagtttctcagattgcttctgcctagattttattggaagatatttccttttctaaaataagccgcaaagcactccaaatgtccacttgcagattctacagaaagaatatttccaaactgctcaatcaaaagaaaagttcaannnnnnnnnnnnnnnnnnnnnnnnnnnnnnnnnnnnnnnnnnnnnnnnnnnnnnnnnnnnctctgtgaaatgaatgaacacttcacaaagaagtttctcagattgtttctgtctagattttatgtgaagatatttacttttctaacataggtcacaaagcactccaagtgtcaacttgcagactctacaaaaagagtgttttcaaactgctcaatcaaaaatagttcaactctgtgagatgaacacatgcatcacaaaaaagtttctcagaattcttctgtctagttttaatgtgaaaatatttcattttccaccataggcctccaagcgttccaaatgtacaattgcagattctacaaaatgagtgtttccaaattgctcagtcaaaagaaagttttagcactgtgaaatgaatgcacacatcacaaagaagtttatcagactgcttttgtctacattttatgtgaagatatgccctttcctaaaatgggccaaaaagccttccaaatgtccactttcagattccacaaaaaaagtgtttcaaaactgctcaattaaatgtaagattcaactctgtgagatgaatgaacacatcacaaagaagtttctcagaaatcttctgtctagtttttatgtgaagatacttccttttctaccataagccgcaagacgctacaaatgtccacttgcagattctacaaaaagagagtttcaaaacttctcaatcataagaaaggttcaactccgtgagatgaatgcacacattagaaagaagtttctcagattccttctgtctagatttcgtgggaagatattttcttttctaacatgggctgcaaagcgatcaaaatgtccacttgcagactctactaaagagtgtttccaaactgctcaatcaaaagaaagcttcaactctgtgagattaaatcacacatcacaaataagtttctcagatttcttctgtctagtttttatgtgaagatatttcattttcgaccgtaggcctcaaggcgctcgaaatgcccaattgcagatactacaaaaagaatatttcaaaactgctcaatcaaaagaaaagttcaactctgtgagattaaatcacacatcacaaagaagtttgtcagaattcttctatctagtttttatatgaagatattaccttttccaccataggtctcaaagcgctccaattccaaattctacaaaaagagactttcaaaactgctctatcaaaagaaaggtttatctctgtgagatgaatgcatacatcacaatgaagtttttttcagatttcttctgtctagattttatgtggagatatttccttttctaccataggccgcaaagcggtccaaatatccacttgcagattgtacaaaaagagtgattccaaactgctcaatcaaaataaaggttcaactctgtgagatgactgcacgcatcacaaagaagtttctcagaattcttctgtatagtttttatgtgaagatatttcattttcgaccatagacctcaaggtgctcgaaatgcccacttgcagattctacaaaaacagtatttcaaaactggtccatcaaaagtaaggttctactctgtgagatgtatgcacacatcacaaagaggtgattctgaagttttctgtccagtttttatgtaaagatattaccttttctaccataggactcaaggtgctccacttgcagattctacaaaaagagtttcaaaacagctctatcaaaagaaaggtttaacactgtgagatgaatgcatacatcatggagaagtttctcagattatttctgtttagattttgtgtgaagatatttccttttttaccagaggcctcaaagtgctccaatatccacttgcagattctacaaaaagagtgtttccaaatagctctatcaaaagaaaagttcaactctgtgagatgaatgcacacatcacaagaattttctcagaattctctgtctagtttttatgttccttttccaccataggcctcaaagcgctacaaatgtccacttgaagattctacaaaaacggagtttgaaaactgctcaatcaaaacaaagttttacctctgtgagatgaatgcacacatcacaaagaagtttctctgattgcttctgtctagatgttatgtgaagatacttgctttcctaccataggccacaaagcactcccaatgtccaattgcagtttctacaaaaagagtatttccaaactgatcaatcaaaagaaagtttcaactctgttagatgaatgcacacatcacaaagaactttctcagaattcttctgtctactttttatgtgaagatatttccttttctaccataggccgcaaaacactccaaatgtccacttgcagattctacaaaaagtgtttccaaacttctcaatcaaaagaaagtttcaactctgtgagatgaacacacacatcacaaagaagtttctcaggttgcttctgtgtagattttatgtgaagatatttccttttcttacataggccaaaaagcactccaaatgtccacttgcagatcctacaaaaagagagtttcaaaactgctctatcaaaagaaaggtttaagtctgtgagatgaatgcacacatcacaaagaagtttctcaggttgcttctgtctagtatttatgtgaagatatttccttttgtaccatgggccacaaagtaatccaaatgtctacttgcacattctacaaaaagtgagtttcaaatctgcactatcaaaagaaaaagtttaactctgtgagatgaatgcccacatcacaaagaactttctcagatggcttctgtctagattttacatgaagatatttccttttctacaataggccacaaagtgctccaaatgtccacttgcagatactacaaaaagaatgtttccatactgctcaatcaaaagaaaatttcaactctgtaagatgaacgcacaactcacgaggtagtttctgaaatttcttctgtatacgttttatgtgaagatatttccttttccaccattggccacaaagcactcctaatgtccatttgcagattcaaccaaaagagatattcaaaactgctcaatcaaaagaaatttttatctctgtgagatgaacacacacgtcacaaagaagtttctgattgcttctgtctatattttatgtgaagatatttccttttctaccataggccgcaaagctctccaaatgtccactggcagattctacaaaaagagtgtttccaaactgctcaaccaaaagaaagtttcaactctgagatgaacgctcacattacaaaggcgtttctcagtattcttctgcctggtttttatgtgaagatatttccttttccacaataggcttctaagcactccaaatgtccacttgcatattctacaaaaagagagtttcaaaacttctcaatcaaaagaaagctttacctctttgagatgaatgctcacatcacaaagaagtttctcagattgcttctgtctagattttatttgaagatatttccttttctgccataggccacaaagttctccaaacgtccacttgcagattctacaaaaagagtgtttccttactgctcaatctaaagaaaattacaacattgtgaaatgaacacacacatcacaaagaagtttctccgaattctactgtctagtttttatgtgaagatatttccttttccaccattggccacaaagcactcctaatgtccatttgcagattcaaccaaaagagatattcaaaacttctcaatcaaaagaaatttttatctctgtgagatgaatacacccatcacaaagaagttcctcagattgcttctgtctagattttatgtgaagatatttccttttctaccataggccgcatagcgctccgtatgtctacttgcagattctacaaaaagagggtttccaaactgctcaatcaaaagtatggttcaactctatgagatgaacgcacacatcacaaagaagtttctcagaattcttctatctagtttttatgggaagatatttccttttccaccataggccacctagtgctccaaatgtctacttgcagattctacaaaaagagagtttcaaaactgctcaatcaaaagaaaattttaactgtgtgacatgaatgcacacatcacaaagtagtttctcagattgcttctgtctggaatttatgtgaacatattaccttttctacaataggccgcaaagtgctccaaatgtccacatgcagattctacaaaaagagtgattccaaactgctcaatcaaaagaaagtttcaaatctgtgagatgaacgcagatatcacaaagaagtttctcagaattcttctgtctggtttttatgtgaagatattaccttttccaccatgggcctgaaagcacttccaatgtacacttgcagattccacaaaagggagtttctaaactgctcaatcaaagggaagttttaactgtgtgagatgaatgcacacatcacaaagaagtttctgagactgcttctgtctaggtttcatgtgaaaatagttccttttgtaccataggccacagagctctccaaatgtgcacttgaagattctacattaagagtgtttccaaactgctccatcaaaagagaggttcaactctgtgaaatgaacacacacatcacaaacaagtttgtcggaattcttcagtctagtttttatgttgaagatattaccttttccaccataggcctcaaagcgctccaatgtacacttgcaggttctacaaaaagagagtttcaaaactgctttatcaaaagaaaggtttaactgtgtgatgtgaatgcatatattacaaagaagtttctcagatttcttgtgtctaaattttatgtgaagatatttccttttctaccattggccacaaagtgctccaaatgtccacttgcagaagaaacacaaaaagagtgtttcctaactgctcaatcaaaagaaaggttgaactcggtgaggtgaacgcacacatcacaacaaagtttctcagaatttttctgtctagtttttttttttttaaagagcagtttgggtttctttctttttttatgttcatagaattatttatttatttatttatttatttattcattattatactttaagttttagggtacatgtacacaatgttcaggttagctacatatgtatacatgtgacatgctggttcgctgcaccaactaagtcatcatctagcattaggtatatatcccaattctatccctcccccctcctcacaacagtccccagagtgtgatgttccccttcctgtgtccatgtgttctcattgttcaattcccacctgtaactgagaatatgcggtgtttggttttttgttcttgtgatagttcactgagaatgatgatttccaatttcatccatgtccctacaaaggacatgaactcatcattttttatggctgcatagtattccatggtgtatatgtgccatattttcttaatccagtctatcattgttggacatttgggttggttccaagtctttgctcttgtgaataatgccacaataaacatacatctgcatgtgtctttatagcagcattatttatagtcctttgggtacatacccagtaatgggatggctgggtgaaatggtatttctagttctaaatccctgaggaatcgccacactgacttccaaaatggtcgaactagtttacagtcccaccaacagtgtaaaagtgttcctatttctccacatcctctccagcacctgttgtttcctgactttttgatgattgccattataactggtgtgaaactttatctcattgtggttttgatttgcatttctctgatggccagtgatggtgagcatttcttcatgtgttttttggctgcataaatgtcttcttttgagaagtgtctgttcatgtcctttgccaactttttgatggggttgtttttttttttttcttgtaaatttgtttgagttctttgtagattctggatattagccctttgtcagatgagtaggttgtgaaaattttctcccattttgtaggttgcctgttcactttgatggtagtttcttttgctgtgcagaagctctttagtttaattagatcccatttgtcaattttggcttttgttgccactgcttttggtgttttagacatgaagtccttgcccatgcctatgtcctgaatggtaatgcttaggttttcttctagggtttttatggttttaggtctaacatttaagtctttaatccatcttgaattgatttttgtataaggtgtaaggaagggatccagtttcagctttctacatatggctagccagttttcccagcactatttattaaatagggaatcctttccccattgcttgtttttctcaggtttgtcaaagatcagataattgtagatatgtggcattatttctgagggctctgttctgttccattgatttatatctctgttttggtaccagtaccatgctgttttggttactgtagccttgtagtatagtttgaagtcaggtagtgtgatgcctccagctttgttcttttggctcaggattgacttggtgatgcaggctcttttttgtttccatatgaagtttaaagtagttttttccaattctgtgaagaaaggcattggtagcttgatggggatggcattgaatctgtaaattatgtagggcagtatggcaattctcacgatattgattcttcctacccatgagcatggaatattcttccatttgtttgtatcctcttttatttccttgagcagcggtttgtagttctccttgaagaggtccttcacatcccttgtaagttggattcctagctattttattctctttgaagcaattgtgaatggtagttcactcatgatttggctctctgtttgtctgttgttggtgtataagaatgcttgtgatttttgcacattgattttgtatcctgagactttgctgaagttgcttatcagcttaaggagattttgggctgagacaatgggttttctagatatacaatcaagtcatctgcaaacagggacaattcgacttccttttttcctaattgaacaccctttatttccttctcctgcttaattgccctggccagaacttccaacactatgttgaataggagtggtgagagagggcatccctgtcttgtgccagttttcaaagtgaatgcttccagtttttgcccattcagtatgatactggctgtgggtttgacatagatagctcttattattttgaaatatgtcccatcaatacttaatttattgagagtttttagcatgaaaggttgttgaattttgtcaaaggccttttctgcatctattgagataatcatgtggttttcacacataggctcaaaataaaagaatggaggaagatctaccaagcaaatggaaaacaaaaaaaaggcaggggttgcaatcctagtctctgataaaacagactttaaaccaacaaagatcaaaagagacaaagaaggccattacataatggtaaagggatcaattcaacaagaagagctaactatcctaaatatatatgcacccaatacaggatcacccagattcataaagcaagtcctgactgatctacaaagagacttatacacccacacattaataatgggaggcttcaacaccccactgtcaacattagacagatcaacgagacagaaagtcaacaaggatacccaggaattgaactcagctcggcaccaagtggacctaacagacatctacagaactctccaccccaaatcaacagaatatacatttttttcaacaccacaccacacttattccaaaattgaccacatacttggaagtaaagctctcctcagcaaatgtaaaagaacagaaattataacaaactatctctcagaccacagtgcaatcaaactagaactcagggttaagaatctcactcaaaaccgctcaactacatggaaactgaacaacctgctcctgaatgactactgggtacataatgaaatgaaggcagaaataaagatgttctttgaaaccaacgagaaaaaagacgcaacataccataatctctgggatgcattcaaagcagtgtgtagagggaaatttatagcactgaatgcccacaagagaaagcaggaaagatccaaaattgacaccctaacatcacaattaaaagaactagaaaagcaagagcaaacacattcaaaagctagcagaaggcaagaaataactaaaatcagagcagaactgaaggaaatagagacacaaaaaacccttcaaaaaattaatgaatccaggagctgttttttgaatggatcaacaaaattgatagacagctagcaagactaataaagaaaaaaagagagaagaattaaatagacgcaataaaaaatgataaaggggatatcaccaccaatcccacagaaatacaaactaccatcagagaatactacaaacacctctacacaaataaactagaaaatctagaagaaatggataaattcctcgacacatacactctcccaagactaaaccaggaagaagttgaatctctgaatagaccaataacaggatctgaaattgtggcaataatcaatagcttaccaaccaaaaagagtccaggaccagatggattcacagccgaattctaccagaggtacaaggaggaactggtaccattacatctgaaactattccaatcattagaaaaagagggaatcctccctaactcattttatgaggccagcatcattcttgataccaaagccgggcagagacacaaccaaaaaagagaatttcagaccaatatccttgatgaacattgatgcaaaaatcctcaataaaatactggcaaaccgaatccagcagcacatgaaaaagctgatccaccatgatcaagtgggcttcatccctgggattcaaggctggttcaatatgtgcaaatcaataaatgtaatccagcatataaacagagccaaagatagaatcactttttgtataatctggaagtggatatttggagcgttttgtatcctatggtgggaaaggaaatatctttccataaatgctacacagaagtattctgaggaactattttttgatgtgtgcattcaactcatagagctgaacctatcttttgatagagcagttttgaaaatctctttttgtagaatcagcaagtggatatttgaaaacctttgcagcctatggtggaaaactaaatatcttcttacaaaaactgcacaaaagcattctgagaaaattctttgtgatgtatgcattcatctcacggagttgaacctctctttcaattgagaagtttggaaacactctttttgtagaatctgcaaatggatatatggagagcttgaggcatatggtggaaaaggaaataacttcccatgaaaactacacagaagcattctgagaaacttctttgtgaggtgtgcattcaactcatcgatttgaaactttctttcaatttagcagtttggaaacactctttttgtagaatctgcaagtagttatttggatcgatttggagcctatgtgggaaaggaaatatcttcacttaaaaactatacagaagtattctgagaaacttctttgtgatgtgtgcattcacctcacagagttgagactatcctttgatagagcagttttgaaactctctttttgtaggatctgcaagtggatatttggagtcttttgtgtcctacgtaggaaaagcaaatatcttcacataaaaactacacagaatcattctgagaaacttctttgtgatgtgtgcattcaactcacagagatgaacttttcttttgatagagcagttttcaaactctctctttatagaatctgcaagtggatactcggagctctttgcagcctaggtaggaaaaggaaatatcttgacatcaaaactacacagaagcattctgagaaacttctttgtgatgtgtgcattcaactcagagttgaacttatcttttgacagagcagttttaaaactctccttttgtagaatctggaagtggatatttggagggctttgaggcctgtggtggaaaaggaaatatcttcacataaaaactacacagaagcattctgagaaagttctttgttatgagtgcatacgtctcacagtgttgaagctatcttttcatatagcagttttgaaaatttctttttgtagaatctgcaagtggatatttggagtcctttgcagcctacagtggaaaacgaaatatcttcacataaaaactacacagaagcattctgagaaacttctttgtgatgtgtccactcatctcacagagttgaacctttcatttgatagagcggttttgaaacactctttttgtaaaaactacacagaagcattctgagaaacttctttgtgatgtgtgcgttcatctcacagagatgaacctatcttttgatagagcagttttgaaactctttctgtagaatctgcaaatggatatttggagcccttagcggcctatggtggaaaaggaattatcttcacataaaaactacacagtatcattctgagaaacttgtttgtgatgtgtgcattcatctcacaaatttgaaccctttcgtcttttgagcagtttgtacaccctctttttgtaaaatctacaagtggatatatggagcgctttgagtcctattgtggaaaaggaaatatcttcacataaaaactacacagaagaattctgagaaacttctttgtgatgtgtgccttcatttcacagagataaaccgttcatttgattgagcagttttgaaactctttttgtagaatctgcaagtggatatttggagccctttgcagcctacggtggaaacggaaatatcttcacataaaaactacacagaagcattctgagacacttctttgtgatgtgtgcattcatctcacagagttgaaactatcttttgatagagcagttttgaaactcttcttttgtagaatctgcgagtggatatttggagccctttgcagccttttgggcaaaaggaaatatcttctaattaaaactacacagaagcattctgagaaacttctttgtcatgtgaacattcaactcaaaatgctgaacctatcttttgagacagcagttttgaaacactctttgtaaggcatctgcaagtggatatttgaagtgctttgaggcctattgtggaaaaggaaatattttcacataaaaactacagagaaccactctgagaaacttctttgtgatgtttgcattcatatcacacagttgaacctctcctttgattgagcagttttgaaacagtctttttgtagaacctgcgggtggttatttggagcactttgaggactattatggaaaaggaattatctccacaaaaaaattacacagacatattgtgagaaatttcttgtgatgtgtgcattcgtctcacagagttgaccctttcttttgatttagcagttttgaaacactctttttgtagagtatgaaaatggatactttgagcacttttaggcctaaggtagaaaaggaaatatcttcacataaaaactacacagaagcattctgagaaagtactttgtgatgtgtgtattcaactcacagaggtgaacctatcttttgatagagcagttttgaaactctctttttgtagaatctgcaagtggatatttgggtccctttgtggtctatcgtggaaaggaaatatcttcacataaaaacaacacagaagtattctgagaaacgtctttgtgatgtgtgcattcatctcacagaattgaacctttcatttgattgcacagttttgaaacactctttttgtagaagctgcaagtggatatttgaatcgctttgaggtctatgttggaaaatgaacgctcttcacataaaaatttcacagaagcattctgagaaacttctttttgatgtgtgcattcaactgtcaaattgaacctatcttttgatagagcagttttgaacctctctttttgtagcatctgcatgtggatatttggagccatttgcagcctaaggtggaaaaggtaatatcttcacataaaaactacagagaagcatggtactgataccaaaacagaggtatagaaaaatggaacagaataggaccctcaaaaataatgccacatatctataactatctgctctttgataaatctgagaaaaacaagaaatagggacaggatttcctattcaactaatggtgttgggaaaactggctagccatatgtggaaagctgaaactggatctcttcctcacaccttatacaaaaattaattcaagatggattaaagctttaaacattagacataaaaccataaaaaccatagaagaaaatgtaggcattaccattctggacatatgcatggccaaagacttcatgtctaaaacatcaaaagcaatggcaacaaaagccaaaattgacaaatgggatataattaaactaaagagcttctgcacagcaaaataaactaccagcagaatgaacaggcaacctacaaaatggagaaaattttggcaacttactcatctgacaaagggataatattcagaatctacaatgaactcaaacaaatttagaagaaaaaataaataaccctatcaaaaagtgggcgaaggacatgaacagacacttctcaaaagaagacattcatgcagccaaaaaacacatgaaaaaatgctcaccatcactggctatcagagaaatgcaaatcaaaaccacaatgagataccatctcacaccagttagaatggcaatcattaaaatgtcaggaaacaacaggtgctggagaggatgtggagaaataggaatacttttatactgttggtgggaatgtaaactagttcaaccattgtggaagtcagtgtggcgattcctcaaggatctagaacaagaaataccatttgacccagccatcccattactgggcatatacccaaaggactataaatcatcctgctataaagacacatgcacacgtatgtttattgcggcactatgcacaataggaaagacttggaaccaacccaaatgtccaacaatgatagactggattaagaaaatgtgacacatatacaccgtggaatactatgcagccataaaaaatgacgagttcatgtcctttgtaggaacatggatgaaattggaaatcatcatcctcagtaaactatcgcaagaataaaaaaccaaacacagcatattctcacttataggagggaattgaacaatgagaacacatggacacaggaaggggaacattacactctggggactgttgtggggtggggagagaggtgagcgataactttaggagataaacctaatgctaagtgacgagttaatggatgcaggacaccaacatggcacatgtatacatatgtaactaacctgcaatttggggaaatgtaccctaaaatttaaagtataataataataaaatgaataaaactacacagaagcattctgagaaatttctttgtgatgtgtggattcatctcacagagttgaaactttcatttgaatgagcagttttgaaacaatctttttgcacaatctgcaagtggatattaggagcactttgaggcctatggtggaaaaggaaacatcttcacataaaaactacacagaagcattctgaaaaacttctttgtgatgtgtgcattcaactcttacagttgaacctatcttttgatagagcagctttgaaactcacttttgtagaatctgcatgtggatagttgcaatgctttgaggcctatgttggaaaaggaaatatcttcacctaacaactgcacagaagcattctgagaatctccgttatgatatgtgcattcatctcacagagttgaaactttgttttcattgagcagttcggaaacactctttttgcagaatctgcaagtggatatttggagtgctttgaggcctattatggaaaaggaaatgttttcacataaatctacacagaagcattctgagaaacttctttgtgatgtgtgcattcttctcacagagttgaagctttctttggatttagcagttttgaaacactctttttgtagaatctgcaggttgatatttggagtgctttgaggcctatggtggaaaagggaatatcttcacacaaaaacttcacagaagcattctgagaaagttgtttgtgatgtgtgcattcatctcacaaagttgaacttttcttttgattgagccgtttggaaactctctttttgttgaatctgcaggtggatatttggagcgctttgaagcctatggtggacaaggaaacatcttcatataaaaactctacagaagcattctgagaaacttctttgtggtgtgtgcattcaactcacagagttgaacttaacttttgacagagcagttttgaaactctctttatgtagaatctccaagtgcatatttggagccctttgttgcctatggtggaaaaggaaatatcttcacctaaaagctacacagaagcattctgataaacttctttctgatgtgtgcattcaaccaacaatgttgaaagtatctgttgattgagcagattagaatctctctttttgtagaatctgcaagtgaatatttggagccctatttcgccctatagtggaaaaggaaatatcttcaaatagaagctacacagaagcattcagagaaacttctttctgatgagagcattcatcacagagttgaacctttgttttgatttagcagttttgagacaatctttccgtagaatctgcaagtaaatatttggagggctttgagttctgttttggagaaggagatatcttcatataaaaactatacagaagcattctgagaaacacctttgtgagttgtgcacggaagtcacgttgttgaacgtatcttttgattcagcagttttgaatctctctttttacagaatctgagagtggatatttggagggctttgaggcgtactgttgaaaatgaaatatcttcacacaaaaactacacagaagcattcggcaaaacttctttgtgatgtgtgcattcatctcacagagttgaatgtctttgttgattgagcagttttgaaacactctttttgtagaatccacaagtagttacttggagcgatttggggcctattgtgggaaaagaaatatcttcacatgaaaactacactgaagcattctgagaactttctttgtgatgtgtgcattcatctcacagagttgaacctatcttttgacagagcagttttgaaactctctttttgtggaatctgcaagtagatatttggagggctttgaggcctgttgtggaaaaggagatatcttcacataaatgctacacgtaagcattctgagaaacttctttgtgatgtgtgcattcaactcacagagttgaacttatcttttgatagaacagttttaaaactctccttttgtagaatctggaagtggatatttggagggctttgaggcctgctgtggaaaaggaaatatcttcacataaaaactacacaaaagcattctgagaaacttctttgtgatgtgtgcacacgtctcacagagttgatcctatcttttcacatagcagttttgaatatgtctttttgtagaatctgcaagtggatatttggagccctttgcagcctatggtggaaaaggatatatcctcacataaaaactacacagaagcgttctgagaaacttctttgtgatgtgtacattcaatttacagagttgaacctatcttttgattgagcagttttgaatctctctttttgtagaatctgcaagtgggtattcagagcgcattgaggcctatgatggaaaaaaaatcttcacataaaactacacagaagaattctgagaaacatctttgtgatgtgtgcattcatctcacagggttgaacctatcttatgattgagcagtttagaaaaactctttttgtagaatatgcaagtggatatttggagcatattggggcctaccatggaaaagaaattatcttcacataaaaactacacagaagcattctgagaaactgctttgtgatgtgtgcattcatctcacagagttgaacatttcttttgattgagcagttttgaaacactatttttgcagaatctgcaagtggatatttggagcgctttgaggcctacagtggaaaagcaaatatcttcacataaccactacacagaaacattcttagaaactcctttgtgatgtgtgcattcatctgacagagttgaaactttcttttgattgagcagttttgaaacactctttgtttagaatctgtaagtctatatctggagcgatttgatgcctacagtggataacgtactatcttcacataaaatctacacaaaagcattctgagaaactactttgtgatgtgtgcattcaactcacacagttgaacctatcttttgattgagcagttttgaatctctctttttttagaatgtgcaagtggatatttggagtcttttgtgccctatggtggaaaaggaaatatcttcaaataaaaactgcacagaatcattcagagaaacttctttgtgacgagtgcattcatcaaacagagtgaaacctttcattgattcagcagttttgaaacactctttttgtagaatctggaagtagatatttggagggatttgaggtctatttttgaaaagaaaatatcttcacctaaaaactatacagaagtattctgagaatgtgctttgtcatgtgtgcgtttaactcacagagttggaactatgtttcaattgagcagttttgaacctctctttttgcagaatctgcaagtggatatttggagccgtttgaggcctactgtggaaaagcaaatatcttcacataaacactccatggaagcattcttagaaacttctgtgtgatgtgtgcattcaactcacagagttgaacttatcttttgattgagcagttttgaatctctctttttgtagactctgaaactagatatttggagacctttttggcctatggtggaaaaggaaatatccttaactaaaaactacaaagaagcattctgagaaacatctttttgatgtgtgcattcacctcacagggttgaacctatcttatgattgagcagttttaaaacactctttgaataatcggctagtggatatttggagcgctttgaggcctaccatggaaaagcaaatattttcagataaaaaccacacagaagcattctgagaaacttcttggtgatgtgtgcattcaactcacagagttgaacctttccttggattgagaaggttttaagcattatttgtagaatctggaagtggatatttggagggctttgaggcctattttggagaaagagatatcttcacataaaaactacacagaagaattatgagaaacttctttgtgaggtgtgcattcaactcaaagagttggacctatcttttgattgagcagttttgaacctctctttgtgcagaatctgtgagtggatatttgaagtgctttgaggcgtattgtggaaaagaaaatatcttcaaataaacactacacagaagaattctgagaaacttctttgttttgtttgcattcaactcaaggagtcgaaccaatcttttgattgagcagttttgaatctctctttttacagaacctgcgagtggatatttggagagatttgaggcctattgtggaaaagaaaatatcttcaaataaaaactacacagaagcattctgagaaacttctttgtgatgcgtgcattcaactcacagagttgaacatatcttttgatggagctgttttgaagctctctttttgtataatctgcaagtggatatttggaaccatttgaggcctacggtggaaaaggatatatattcacataaaaactatacagaagcattctgaacacttctttgtgatgtgtgcattcaactgacagtgttgaacctctcttttgattgagcagtttagaatccctatttttgtggaatctgcaagtggatatttggagccctgtgagacctatggtggaaaaggaaatatcttttaataaaaaatacacaaaagattcagagaaacttctttgttatgaatgcattcatcacacagagttgaaaatttctttgggtagagcagttttgaaacactcttttcgtagaatctggaagtggatatttggagggctttgaggcctattttggagaaggagatatcttcacacaaaaactacaaagaagcattctgagaaacttctttgaaaggtgtgcattcaactcacagagctgaacctatcttttgactgagcagttattaatctctctttttacagaatctgagagtggatatttggagcgctttgaggcgtactgtggaaaatgaaatatcttcacacaaaaactacacagaagcattctgagaaacttctttgtgatgtgtgcattcatctcacagagttgaatgtctctgttgattgagcagttttgaaacactctttttgtggaatctgcaagtggatatttggagctcattggggcctactgtggaaaatcaaatatcttcacataaaaactacacagaagcattctgaaaaacttctttgtgatctgtgcattcatctcacagagttggatgtttctattgatatagcagttttgaaacactcttttttagaatctgtaaatggatatttggagccttttcaggcctacagtgtagaaggaaatatcttcacataaaaactatgcagaagcattctgagaaactactttgtgatgcgtgcattcatctcacagggtacaacctttctttggattgagcagttttgaaacactctttttgtagaatctgcaagtggatatttagagtgatttgaggcctattgtggaaagggaaatttcttcaactaaaaactacccagaagcattctgtgaaacttatttgcgatgtgtgcattcaactcacattgttgaaggtatctgttgattgagtagtttagaatctctctttttgtagaatctgcaagtgaatatttggggccctattttgccctatattggaaaaggaaatatcttcaaatagaaactacacagaagcattcagagaaccttctttctgatgagtgcattcatcacagagttgaacctttgttttgatttagcagttttgacacaatctttccgtacaatctggaagtgaatatttggagggctttgagatctgttttggaggaggagatatcttcatataaaaactacacagaagatttctgaggaacatctttgtgaattgtgcacctaagtcacagtgttgaacctatcttttgattcagcagttttgaatctctctttttacagaatctgagagtggatatttggagcgctttgaggcgtactgttgaaaatgaaatatcttcacacaaaaactacacagaagcattcggcaaaacttgtttgtgatgtgtgcattcatctcacagagttgaatgtctctgttgattgagcagttttgaaacactctttttgtagaatctgcaagtggatatttggagctcattggggcctacagtggaaaaacaaataacttctcataaaaactacacagaagcattctgagaaacttctttgtgatctgtgcattcatctcacagagttggatgtttctattgatacagcagttttgaaacactctttttttagaatctgtaaaaggatatttggagtcatttcaggcctacagtgtagaaggaaatatcttcacataaaaactacacagaagcattctgagaaacttctttgtgatgggtgcattcatctcacagagttgaatgtctctgttgattgagcagttttgaaacactctttttgtagaatctgcaagtggatatttggagctcattggggactactgtggaaaaacaaatatcttcacataaaaactacacagaagcattctgaggaacttctttgttatctgtgcattcatctcacagtgttgaatcattcttttgatacagaagtttagaagcactctttttttagattccgcaagtggatatttggagccttttgaggcctatagtggagaaggaaatatcttcacataaaaactatgcagaagcattctgagaaactactttatgatgtgttcattcatctcacagagtagaacctttctttggattgagctgttttgaaacagtctttttttcgaatctgcaagtggatatttggagccttttgagacctgtagtggagaaggaaatatcttcacataaaaactatgcagaagcattctgagaaaccactttgtgatgcgtgcattcatctcacagagtagaagctttcttttgattgagcagttttgaaacactctttttgtagaatctgcaagaatatatttagagcgatttgaggcctattgtggaaagggaaatttcttcaaataaaaactacccagaagcattctgtgaaacttatttgtgatgtgtgcattcaactcaaattgttgaacgtatctgttgattgagcagtttagaatctctctttttgtagaatctgcaagtgaatatttggagccctatttcgccctatagtggaaaaggaaatatcttcaaatagaaactacacagaagcattcagagaaccttctttctgatgagtgcattcatcacagagttgaacctttgttttgatttagcagttttgacacaatctttccgtacaatctggaagtgaatatttggagggctttgagttctgttttggagaaggagatatcttcatataaaaactacacagaagatttctgagaaacacctttgtgagttgtgcactgaagtcacagtgttgaacctatcttttgattcagcagttttgaatctctctttttacagaacctgcgagtggatatttggagcgctttgaggcgtactgtggaaaatgaaatatcttcacacaaaaactacacagaagcattctgagaaacttctttgtgatgggtgcattcatctcacagagttgaatgtctctgttgattgagcagttttgaaacactctttttgtggaatctgcaagtggatatttggagctcattggggcctactgtggaaaaacaaatatcttcacataaaaactacacagaagcattctgagaaacttctttgcgatctgtgcattcatctcacagagttgaatctttgttttgatacagcagttttgaaacactctttttttagaatccgcaagtggatatttggagccttttgaggcctatagtggagaaggaaatatcttcacataaaaactatgcagaagcattctgagaaagtactttgtgatgtgtgcattcatctcatacagtagaacctttctttggattgagcagttttgaaacactctttttttagaatctgcaagtggatatttagagcgttttgaggcctattgtggaaagggaaatttcttcacataaaaactacccagaagcattctgtgaaacttatttgtgatgtgtgcattcatctcacattgttgaaggtatctgttgattgagcagtttagaatctctctttttgtagaatctgcaagtggatatttggagccccttgcaacctatggtggtaaaggaaataccttcaaataaaaactacatagaagcattctgaaaaacttctttgttatgtgtgcattcatctcacagggttgaacctatctaatgattgagcagttttgaaacactcattttgtagaatctgcaagtggatatttggagcgctttgagaccttccgtggacaagctaatgtcttcacataaaaactacactgaagcattctgagaaactactttgtgatgtgtgcattcatctcacagttttagacgtttcttttgattgagcagttttggaatactctttttgtagaatctgcaagtggatatttggagccctatgagccctatggtggaagaggaaatatcttcaaatacaaaatacacagaagcattcagagaaacttctttgtgatgagtgcattcatcacacagtgttgaacatttctttggattgagcagttttgaagcactattgtcatggaatctggaagtgcatatttggaggtcattggggcctattttggagaaggagatatcttcacataaaaactacacagaaactttatgagaaacttctttgtgaggtgtgcattcaactcacagatttgaacctatcgtttgattgagcagttttgaatctctcttatttcagaatctgaaagtggatatttggagccctttgaggcctactgtggaaaatcaaatatattcacctaaaaactacacagaggtattctgagaaacttctttgttttgtgtgcattcaactcacatatttgaacttatcttttgattgtacagttttgaatctccctttttgcagaatctgcaagtggatatttggagccctattttgccctatagtggaaaagcaaatatcttcacataaacaaacacaacacagaagcattcagagaaactactttgtgatttgtgcattcaacacgcagagttgaaactatcttttgattgaacagctttgaatctctctttttgtagaatctgcaagtggaagtttggagccctttgtggcctatggtggaaaaggaaatatcttcaaataaaaactacacaaaaacattctgagaagctactttgtgatgtgggcattcatctcacaaggttgaacctatcatatgatgagcagtnnnnnnnnnnnnnnnnnnnnnnnnnnnnnnnnnnnnnnnnnnnnnnnnnnnnnnnnnnnnnnnnnnnnnnnnnnnnnnnnnnnnnnnnnnnnnnnnnnnnnnnnnnnnnnnnnnnnnnnnnnnnnnnnnnnnnnnnnnnnnnnnnnnnnnnnnnnnnnnnnnnnnnnnnnnnnnnnnnnnnnnnnnnnnnnnnnnnnnnnnnnnnnnnnnnnnnnnnnnnnnnnnnnnnnnnnnnnnnnnnnnnnnnnnnnnnnnnnnnnnnnnnnnnnnnnnnnnnnnnnnnnnnnnnnnnnnnnnnnnnnnnnnnnnnnnnnnnnnnnnnnnnnnnnnnnnnnnnnnnnnnnnnnnnnnnnnnnnnnnnnnnnnnnnnnnnnnnnnnnnnnnnnnnnnnnnnnnnnnnnnnnnnnnnnnnnnnnnnnnnnnnnnnnnnnnnnnnnnnnnnnnnnnnnnnnnnnnnnnnnnnnnnnnnnnnnnnnnnnnnnnnnnnnnnnnnnnnnnnnnnnnnnnnnnnnnnnnnnnnnnnnnnnnnnnnnnnnnnnnnnnnnnnnnnnnnnnnnnnnnnnnnnnnnnnnnnnnnnnnnnnnnnnnnnnnnnnnnnnnnnnnnnnnnnnnnnnnnnnnnnnnnnnnnnnnnnnnnnnnnnnnnnnnnnnnnnnnnnnnnnnnnnnnnnnnnnnnnnnnnnnnnnnnnnnnnnnnnnnnnnnnnnnnnnnnnnnnnnnnnnnnnnnnnnnnnnnnnnnnnnnnnnnnnnnnnnnnnnnnnnnnnnnnnnnnnnnnnnnnnnnnnnnnnnnnnnnnnnnnnnnnnnnnnnnnnnnnnnnnnnnnnnnnnnnnnnnnnnnnnnnnnnnnnnnnnnnnnnnnnnnnnnnnnnnnnnnnnnnnnnnnnnnnnnnnnnnnnnnnnnnnnnnnnnnnnnnnnnnnnnnnnnnnnnnnnnnnnnnnnnnnnnnnnnnnnnnnnnnnnnnnnnnnnnnnnnnnnnnnnnnnnnnnnnnnnnnnnnnnnnnnnnnnnnnnnnnnnnnnnnnnnnnnnnnnnnnnnnnnnnnnnnnnnnnnnnnnnnnnnnnnnnnnnnnnnnnnnnnnnnnnnnnnnnnnnnnnnnnnnnnnnnnnnnnnnnnnnnnnnnnnnnnnnnnnnnnnnnnnnnnnnnnnnnnnnnnnnnnnnnnnnnnnnnnnnnnnnnnnnnnnnnnnnnnnnnnnnnnnnnnnnnnnnnnnnnnnnnnnnnnnnnnnnnnnnnnnnnnnnnnnnnnnnnnnnnnnnnnnnnnnnnnnnnnnnnnnnnnnnnnnnnnnnnnnnnnnnnnnnnnnnnnnnnnnnnnnnnnnnnnnnnnnnnnnnnnnnnnnnnnnnnnnnnnnnnnnnnnnnnnnnnnnnnnnnnnnnnnnnnnnnnnnnnnnnnnnnnnnnnnnnnnnnnnnnnnnnnnnnnnnnnnnnnnnnnnnnnnnnnnnnnnnnnnnnnnnnnnnnnnnnnnnnnnnnnnnnnnnnnnnnnnnnnnnnnnnnnnnnnnnnnnnnnnnnnnnnnnnnnnnnnnnnnnnnnnnnnnnnnnnnnnnnnnnnnnnnnnnnnnnnnnnnnnnnnnnnnnnnnnnnnnnnnnnnnnnnnnnnnnnnnnnnnnnnnnnnnnnnnnnnnnnnnnnnnnnnnnnnnnnnnnnnnnnnnnnnnnnnnnnnnnnnnnnnnnnnnnnnnnnnnnnnnnnnnnnnnnnnnnnnnnnnnnnnnnnnnnnnnnnnnnnnnnnnnnnnnnnnnnnnnnnnnnnnnnnnnnnnnnnnnnnnnnnnnnnnnnnnnnnnnnnnnnnnnnnnnnnnnnnnnnnnnnnnnnnnnnnnnnnnnnnnnnnnnnnnnnnnnnnnnnnnnnnnnnnnnnnnnnnnnnnnnnnnnnnnnnnnnnnnnnnnnnnnnnnnnnnnnnnnnnnnnnnnnnnnnnnnnnnnnnnnnnnnnnnnnnnnnnnnnnnnnnnnnnnnnnnnnnnnnnnnnnnnnnnnnnnnnnnnnnnnnnnnnnnnnnnnnnnnnnnnnnnnnnnnnnnnnnnnnnnnnnnnnnnnnnnnnnnnnnnnnnnnnnnnnnnnnnnnnnnnnnnnnnnnnnnnnnnnnnnnnnnnnnnnnnnnnnnnnnnnnnnnnnnnnnnnnnnnnnnnnnnnnnnnnnnnnnnnnnnnnnnnnnnnnnnnnnnnnnnnnnnnnnnnnnnnnnnnnnnnnnnnnnnnnnnnnnnnnnnnnnnnnnnnnnnnnnnnnnnnnnnnnnnnnnnnnnnnnnnnnnnnnnnnnnnnnnnnnnnnnnnnnnnnnnnnnnnnnnnnnnnnnnnnnnnnnnnnnnnnnnnnnnnnnnnnnnnnnnnnnnnnnnnnnnnnnnnnnnnnnnnnnnnnnnnnnnnnnnnnnnnnnnnnnnnnnnnnnnnnnnnnnnnnnnnnnnnnnnnnnnnnnnnnnnnnnnnnnnnnnnnnnnnnnnnnnnnnnnnnnnnnnnnnnnnnnnnnnnnnnnnnnnnnnnnnnnnnnnnnnnnnnnnnnnnnnnnnnnnnnnnnnnnnnnnnnnnnnnnnnnnnnnnnnnnnnnnnnnnnnnnnnnnnnnnnnnnnnnnnnnnnnnnnnnnnnnnnnnnnnnnnnnnnnnnnnnnnnnnnnnnnnnnnnnnnnnnnnnnnnnnnnnnnnnnnnnnnnnnnnnnnnnnnnnnnnnnnnnnnnnnnnnnnnnnnnnnnnnnnnnnnnnnnnnnnnnnnnnnnnnnnnnnnnnnnnnnnnnnnnnnnnnnnnnnnnnnnnnnnnnnnnnnnnnnnnnnnnnnnnnnnnnnnnnnnnnnnnnnnnnnnnnnnnnnnnnnnnnnnnnnnnnnnnnnnnnnnnnnnnnnnnnnnnnnnnnnnnnnnnnnnnnnnnnnnnnnnnnnnnnnnnnnnnnnnnnnnnnnnnnnnnnnnnnnnnnnnnnnnnnnnnnnnnnnnnnnnnnnnnnnnnnnnnnnnnnnnnnnnnnnnnnnnnnnnnnnnnnnnnnnnnnnnnnnnnnnnnnnnnnnnnnnnnnnnnnnnnnnnnnnnnnnnnnnnnnnnnnnnnnnnnnnnnnnnnnnnnnnnnnnnnnnnnnnnnnnnnnnnnnnnnnnnnnnnnnnnnnnnnnnnnnnnnnnnnnnnnnnnnnnnnnnnnnnnnnnnnnnnnnnnnnnnnnnnnnnnnnnnnnnnnnnnnnnnnnnnnnnnnnnnnnnnnnnnnnnnnnnnnnnnnnnnnnnnnnnnnnnnnnnnnnnnnnnnnnnnnnnnnnnnnnnnnnnnnnnnnnnnnnnnnnnnnnnnnnnnnnnnnnnnnnnnnnnnnnnnnnnnnnnnnnnnnnnnnnnnnnnnnnnnnnnnnnnnnnnnnnnnnnnnnnnnnnnnnnnnnnnnnnnnnnnnnnnnnnnnnnnnnnnnnnnnnnnnnnnnnnnnnnnnnnnnnnnnnnnnnnnnnnnnnnnnnnnnnnnnnnnnnnnnnnnnnnnnnnnnnnnnnnnnnnnnnnnnnnnnnnnnnnnnnnnnnnnnnnnnnnnnnnnnnnnnnnnnnnnnnnnnnnnnnnnnnnnnnnnnnnnnnnnnnnnnnnnnnnnnnnnnnnnnnnnnnnnnnnnnnnnnnnnnnnnnnnnnnnnnnnnnnnnnnnnnnnnnnnnnnnnnnnnnnnnnnnnnnnnnnnnnnnnnnnnnnnnnnnnnnnnnnnnnnnnnnnnnnnnnnnnnnnnnnnnnnnnnnnnnnnnnnnnnnnnnnnnnnnnnnnnnnnnnnnnnnnnnnnnnnnnnnnnnnnnnnnnnnnnnnnnnnnnnnnnnnnnnnnnnnnnnnnnnnnnnnnnnnnnnnnnnnnnnnnnnnnnnnnnnnnnnnnnnnnnnnnnnnnnnnnnnnnnnnnnnnnnnnnnnnnnnnnnnnnnnnnnnnnnnnnnnnnnnnnnnnnnnnnnnnnnnnnnnnnnnnnnnnnnnnnnnnnnnnnnnnnnnnnnnnnnnnnnnnnnnnnnnnnnnnnnnnnnnnnnnnnnnnnnnnnnnnnnnnnnnnnnnnnnnnnnnnnnnnnnnnnnnnnnnnnnnnnnnnnnnnnnnnnnnnnnnnnnnnnnnnnnnnnnnnnnnnnnnnnnnnnnnnnnnnnnnnnnnnnnnnnnnnnnnnnnnnnnnnnnnnnnnnnnnnnnnnnnnnnnnnnnnnnnnnnnnnnnnnnnnnnnnnnnnnnnnnnnnnnnnnnnnnnnnnnnnnnnnnnnnnnnnnnnnnnnnnnnnnnnnnnnnnnnnnnnnnnnnnnnnnnnnnnnnnnnnnnnnnnnnnnnnnnnnnnnnnnnnnnnnnnnnnnnnnnnnnnnnnnnnnnnnnnnnnnnnnnnnnnnnnnnnnnnnnnnnnnnnnnnnnnnnnnnnnnnnnnnnnnnnnnnnnnnnnnnnnnnnnnnnnnnnnnnnnnnnnnnnnnnnnnnnnnnnnnnnnnnnnnnnnnnnnnnnnnnnnnnnnnnnnnnnnnnnnnnnnnnnnnnnnnnnnnnnnnnnnnnnnnnnnnnnnnnnnnnnnnnnnnnnnnnnnnnnnnnnnnnnnnnnnnnnnnnnnnnnnnnnnnnnnnnnnnnnnnnnnnnnnnnnnnnnnnnnnnnnnnnnnnnnnnnnnnnnnnnnnnnnnnnnnnnnnnnnnnnnnnnnnnnnnnnnnnnnnnnnnnnnnnnnnnnnnnnnnnnnnnnnnnnnnnnnnnnnnnnnnnnnnnnnnnnnnnnnnnnnnnnnnnnnnnnnnnnnnnnnnnnnnnnnnnnnnnnnnnnnnnnnnnnnnnnnnnnnnnnnnnnnnnnnnnnnnnnnnnnnnnnnnnnnnnnnnnnnnnnnnnnnnnnnnnnnnnnnnnnnnnnnnnnnnnnnnnnnnnnnnnnnnnnnnnnnnnnnnnnnnnnnnnnnnnnnnnnnnnnnnnnnnnnnnnnnnnnnnnnnnnnnnnnnnnnnnnnnnnnnnnnnnnnnnnnnnnnnnnnnnnnnnnnnnnnnnnnnnnnnnnnnnnnnnnnnnnnnnnnnnnnnnnnnnnnnnnnnnnnnnnnnnnnnnnnnnnnnnnnnnnnnnnnnnnnnnnnnnnnnnnnnnnnnnnnnnnnnnnnnnnnnnnnnnnnnnnnnnnnnnnnnnnnnnnnnnnnnnnnnnnnnnnnnnnnnnnnnnnnnnnnnnnnnnnnnnnnnnnnnnnnnnnnnnnnnnnnnnnnnnnnnnnnnnnnnnnnnnnnnnnnnnnnnnnnnnnnnnnnnnnnnnnnnnnnnnnnnnnnnnnnnnnnnnnnnnnnnnnnnnnnnnnnnnnnnnnnnnnnnnnnnnnnnnnnnnnnnnnnnnnnnnnnnnnnnnnnnnnnnnnnnnnnnnnnnnnnnnnnnnnnnnnnnnnnnnnnnnnnnnnnnnnnnnnnnnnnnnnnnnnnnnnnnnnnnnnnnnnnnnnnnnnnnnnnnnnnnnnnnnnnnnnnnnnnnnnnnnnnnnnnnnnnnnnnnnnnnnnnnnnnnnnnnnnnnnnnnnnnnnnnnnnnnnnnnnnnnnnnnnnnnnnnnnnnnnnnnnnnnnnnnnnnnnnnnnnnnnnnnnnnnnnnnnnnnnnnnnnnnnnnnnnnnnnnnnnnnnnnnnnnnnnnnnnnnnnnnnnnnnnnnnnnnnnnnnnnnnnnnnnnnnnnnnnnnnnnnnnnnnnnnnnnnnnnnnnnnnnnnnnnnnnnnnnnnnnnnnnnnnnnnnnnnnnnnnnnnnnnnnnnnnnnnnnnnnnnnnnnnnnnnnnnnnnnnnnnnnnnnnnnnnnnnnnnnnnnnnnnnnnnnnnnnnnnnnnnnnnnnnnnnnnnnnnnnnnnnnnnnnnnnnnnnnnnnnnnnnnnnnnnnnnnnnnnnnnnnnnnnnnnnnnnnnnnnnnnnnnnnnnnnnnnnnnnnnnnnnnnnnnnnnnnnnnnnnnnnnnnnnnnnnnnnnnnnnnnnnnnnnnnnnnnnnnnnnnnnnnnnnnnnnnnnnnnnnnnnnnnnnnnnnnnnnnnnnnnnnnnnnnnnnnnnnnnnnnnnnnnnnnnnnnnnnnnnnnnnnnnnnnnnnnnnnnnnnnnnnnnnnnnnnnnnnnnnnnnnnnnnnnnnnnnnnnnnnnnnnnnnnnnnnnnnnnnnnnnnnnnnnnnnnnnnnnnnnnnnnnnnnnnnnnnnnnnnnnnnnnnnnnnnnnnnnnnnnnnnnnnnnnnnnnnnnnnnnnnnnnnnnnnnnnnnnnnnnnnnnnnnnnnnnnnnnnnnnnnnnnnnnnnnnnnnnnnnnnnnnnnnnnnnnnnnnnnnnnnnnnnnnnnnnnnnnnnnnnnnnnnnnnnnnnnnnnnnnnnnnnnnnnnnnnnnnnnnnnnnnnnnnnnnnnnnnnnnnnnnnnnnnnnnnnnnnnnnnnnnnnnnnnnnnnnnnnnnnnnnnnnnnnnnnnnnnnnnnnnnnnnnnnnnnnnnnnnnnnnnnnnnnnnnnnnnnnnnnnnnnnnnnnnnnnnnnnnnnnnnnnnnnnnnnnnnnnnnnnnnnnnnnnnnnnnnnnnnnnnnnnnnnnnnnnnnnnnnnnnnnnnnnnnnnnnnnnnnnnnnnnnnnnnnnnnnnnnnnnnnnnnnnnnnnnnnnnnnnnnnnnnnnnnnnnnnnnnnnnnnnnnnnnnnnnnnnnnnnnnnnnnnnnnnnnnnnnnnnnnnnnnnnnnnnnnnnnnnnnnnnnnnnnnnnnnnnnnnnnnnnnnnnnnnnnnnnnnnnnnnnnnnnnnnnnnnnnnnnnnnnnnnnnnnnnnnnnnnnnnnnnnnnnnnnnnnnnnnnnnnnnnnnnnnnnnnnnnnnnnnnnnnnnnnnnnnnnnnnnnnnnnnnnnnnnnnnnnnnnnnnnnnnnnnnnnnnnnnnnnnnnnnnnnnnnnnnnnnnnnnnnnnnnnnnnnnnnnnnnnnnnnnnnnnnnnnnnnnnnnnnnnnnnnnnnnnnnnnnnnnnnnnnnnnnnnnnnnnnnnnnnnnnnnnnnnnnnnnnnnnnnnnnnnnnnnnnnnnnnnnnnnnnnnnnnnnnnnnnnnnnnnnnnnnnnnnnnnnnnnnnnnnnnnnnnnnnnnnnnnnnnnnnnnnnnnnnnnnnnnnnnnnnnnnnnnnnnnnnnnnnnnnnnnnnnnnnnnnnnnnnnnnnnnnnnnnnnnnnnnnnnnnnnnnnnnnnnnnnnnnnnnnnnnnnnnnnnnnnnnnnnnnnnnnnnnnnnnnnnnnnnnnnnnnnnnnnnnnnnnnnnnnnnnnnnnnnnnnnnnnnnnnnnnnnnnnnnnnnnnnnnnnnnnnnnnnnnnnnnnnnnnnnnnnnnnnnnnnnnnnnnnnnnnnnnnnnnnnnnnnnnnnnnnnnnnnnnnnnnnnnnnnnnnnnnnnnnnnnnnnnnnnnnnnnnnnnnnnnnnnnnnnnnnnnnnnnnnnnnnnnnnnnnnnnnnnnnnnnnnnnnnnnnnnnnnnnnnnnnnnnnnnnnnnnnnnnnnnnnnnnnnnnnnnnnnnnnnnnnnnnnnnnnnnnnnnnnnnnnnnnnnnnnnnnnnnnnnnnnnnnnnnnnnnnnnnnnnnnnnnnnnnnnnnnnnnnnnnnnnnnnnnnnnnnnnnnnnnnnnnnnnnnnnnnnnnnnnnnnnnnnnnnnnnnnnnnnnnnnnnnnnnnnnnnnnnnnnnnnnnnnnnnnnnnnnnnnnnnnnnnnnnnnnnnnnnnnnnnnnnnnnnnnnnnnnnnnnnnnnnnnnnnnnnnnnnnnnnnnnnnnnnnnnnnnnnnnnnnnnnnnnnnnnnnnnnnnnnnnnnnnnnnnnnnnnnnnnnnnnnnnnnnnnnnnnnnnnnnnnnnnnnnnnnnnnnnnnnnnnnnnnnnnnnnnnnnnnnnnnnnnnnnnnnnnnnnnnnnnnnnnnnnnnnnnnnnnnnnnnnnnnnnnnnnnnnnnnnnnnnnnnnnnnnnnnnnnnnnnnnnnnnnnnnnnnnnnnnnnnnnnnnnnnnnnnnnnnnnnnnnnnnnnnnnnnnnnnnnnnnnnnnnnnnnnnnnnnnnnnnnnnnnnnnnnnnnnnnnnnnnnnnnnnnnnnnnnnnnnnnnnnnnnnnnnnnnnnnnnnnnnnnnnnnnnnnnnnnnnnnnnnnnnnnnnnnnnnnnnnnnnnnnnnnnnnnnnnnnnnnnnnnnnnnnnnnnnnnnnnnnnnnnnnnnnnnnnnnnnnnnnnnnnnnnnnnnnnnnnnnnnnnnnnnnnnnnnnnnnnnnnnnnnnnnnnnnnnnnnnnnnnnnnnnnnnnnnnnnnnnnnnnnnnnnnnnnnnnnnnnnnnnnnnnnnnnnnnnnnnnnnnnnnnnnnnnnnnnnnnnnnnnnnnnnnnnnnnnnnnnnnnnnnnnnnnnnnnnnnnnnnnnnnnnnnnnnnnnnnnnnnnnnnnnnnnnnnnnnnnnnnnnnnnnnnnnnnnnnnnnnnnnnnnnnnnnnnnnnnnnnnnnnnnnnnnnnnnnnnnnnnnnnnnnnnnnnnnnnnnnnnnnnnnnnnnnnnnnnnnnnnnnnnnnnnnnnnnnnnnnnnnnnnnnnnnnnnnnnnnnnnnnnnnnnnnnnnnnnnnnnnnnnnnnnnnnnnnnnnnnnnnnnnnnnnnnnnnnnnnnnnnnnnnnnnnnnnnnnnnnnnnnnnnnnnnnnnnnnnnnnnnnnnnnnnnnnnnnnnnnnnnnnnnnnnnnnnnnnnnnnnnnnnnnnnnnnnnnnnnnnnnnnnnnnnnnnnnnnnnnnnnnnnnnnnnnnnnnnnnnnnnnnnnnnnnnnnnnnnnnnnnnnnnnnnnnnnnnnnnnnnnnnnnnnnnnnnnnnnnnnnnnnnnnnnnnnnnnnnnnnnnnnnnnnnnnnnnnnnnnnnnnnnnnnnnnnnnnnnnnnnnnnnnnnnnnnnnnnnnnnnnnnnnnnnnnnnnnnnnnnnnnnnnnnnnnnnnnnnnnnnnnnnnnnnnnnnnnnnnnnnnnnnnnnnnnnnnnnnnnnnnnnnnnnnnnnnnnnnnnnnnnnnnnnnnnnnnnnnnnnnnnnnnnnnnnnnnnnnnnnnnnnnnnnnnnnnnnnnnnnnnnnnnnnnnnnnnnnnnnnnnnnnnnnnnnnnnnnnnnnnnnnnnnnnnnnnnnnnnnnnnnnnnnnnnnnnnnnnnnnnnnnnnnnnnnnnnnnnnnnnnnnnnnnnnnnnnnnnnnnnnnnnnnnnnnnnnnnnnnnnnnnnnnnnnnnnnnnnnnnnnnnnnnnnnnnnnnnnnnnnnnnnnnnnnnnnnnnnnnnnnnnnnnnnnnnnnnnnnnnnnnnnnnnnnnnnnnnnnnnnnnnnnnnnnnnnnnnnnnnnnnnnnnnnnnnnnnnnnnnnnnnnnnnnnnnnnnnnnnnnnnnnnnnnnnnnnnnnnnnnnnnnnnnnnnnnnnnnnnnnnnnnnnnnnnnnnnnnnnnnnnnnnnnnnnnnnnnnnnnnnnnnnnnnnnnnnnnnnnnnnnnnnnnnnnnnnnnnnnnnnnnnnnnnnnnnnnnnnnnnnnnnnnnnnnnnnnnnnnnnnnnnnnnnnnnnnnnnnnnnnnnnnnnnnnnnnnnnnnnnnnnnnnnnnnnnnnnnnnnnnnnnnnnnnnnnnnnnnnnnnnnnnnnnnnnnnnnnnnnnnnnnnnnnnnnnnnnnnnnnnnnnnnnnnnnnnnnnnnnnnnnnnnnnnnnnnnnnnnnnnnnnnnnnnnnnnnnnnnnnnnnnnnnnnnnnnnnnnnnnnnnnnnnnnnnnnnnnnnnnnnnnnnnnnnnnnnnnnnnnnnnnnnnnnnnnnnnnnnnnnnnnnnnnnnnnnnnnnnnnnnnnnnnnnnnnnnnnnnnnnnnnnnnnnnnnnnnnnnnnnnnnnnnnnnnnnnnnnnnnnnnnnnnnnnnnnnnnnnnnnnnnnnnnnnnnnnnnnnnnnnnnnnnnnnnnnnnnnnnnnnnnnnnnnnnnnnnnnnnnnnnnnnnnnnnnnnnnnnnnnnnnnnnnnnnnnnnnnnnnnnnnnnnnnnnnnnnnnnnnnnnnnnnnnnnnnnnnnnnnnnnnnnnnnnnnnnnnnnnnnnnnnnnnnnnnnnnnnnnnnnnnnnnnnnnnnnnnnnnnnnnnnnnnnnnnnnnnnnnnnnnnnnnnnnnnnnnnnnnnnnnnnnnnnnnnnnnnnnnnnnnnnnnnnnnnnnnnnnnnnnnnnnnnnnnnnnnnnnnnnnnnnnnnnnnnnnnnnnnnnnnnnnnnnnnnnnnnnnnnnnnnnnnnnnnnnnnnnnnnnnnnnnnnnnnnnnnnnnnnnnnnnnnnnnnnnnnnnnnnnnnnnnnnnnnnnnnnnnnnnnnnnnnnnnnnnnnnnnnnnnnnnnnnnnnnnnnnnnnnnnnnnnnnnnnnnnnnnnnnnnnnnnnnnnnnnnnnnnnnnnnnnnnnnnnnnnnnnnnnnnnnnnnnnnnnnnnnnnnnnnnnnnnnnnnnnnnnnnnnnnnnnnnnnnnnnnnnnnnnnnnnnnnnnnnnnnnnnnnnnnnnnnnnnnnnnnnnnnnnnnnnnnnnnnnnnnnnnnnnnnnnnnnnnnnnnnnnnnnnnnnnnnnnnnnnnnnnnnnnnnnnnnnnnnnnnnnnnnnnnnnnnnnnnnnnnnnnnnnnnnnnnnnnnnnnnnnnnnnnnnnnnnnnnnnnnnnnnnnnnnnnnnnnnnnnnnnnnnnnnnnnnnnnnnnnnnnnnnnnnnnnnnnnnnnnnnnnnnnnnnnnnnnnnnnnnnnnnnnnnnnnnnnnnnnnnnnnnnnnnnnnnnnnnnnnnnnnnnnnnnnnnnnnnnnnnnnnnnnnnnnnnnnnnnnnnnnnnnnnnnnnnnnnnnnnnnnnnnnnnnnnnnnnnnnnnnnnnnnnnnnnnnnnnnnnnnnnnnnnnnnnnnnnnnnnnnnnnnnnnnnnnnnnnnnnnnnnnnnnnnnnnnnnnnnnnnnnnnnnnnnnnnnnnnnnnnnnnnnnnnnnnnnnnnnnnnnnnnnnnnnnnnnnnnnnnnnnnnnnnnnnnnnnnnnnnnnnnnnnnnnnnnnnnnnnnnnnnnnnnnnnnnnnnnnnnnnnnnnnnnnnnnnnnnnnnnnnnnnnnnnnnnnnnnnnnnnnnnnnnnnnnnnnnnnnnnnnnnnnnnnnnnnnnnnnnnnnnnnnnnnnnnnnnnnnnnnnnnnnnnnnnnnnnnnnnnnnnnnnnnnnnnnnnnnnnnnnnnnnnnnnnnnnnnnnnnnnnnnnnnnnnnnnnnnnnnnnnnnnnnnnnnnnnnnnnnnnnnnnnnnnnnnnnnnnnnnnnnnnnnnnnnnnnnnnnnnnnnnnnnnnnnnnnnnnnnnnnnnnnnnnnnnnnnnnnnnnnnnnnnnnnnnnnnnnnnnnnnnnnnnnnnnnnnnnnnnnnnnnnnnnnnnnnnnnnnnnnnnnnnnnnnnnnnnnnnnnnnnnnnnnnnnnnnnnnnnnnnnnnnnnnnnnnnnnnnnnnnnnnnnnnnnnnnnnnnnnnnnnnnnnnnnnnnnnnnnnnnnnnnnnnnnnnnnnnnnnnnnnnnnnnnnnnnnnnnnnnnnnnnnnnnnnnnnnnnnnnnnnnnnnnnnnnnnnnnnnnnnnnnnnnnnnnnnnnnnnnnnnnnnnnnnnnnnnnnnnnnnnnnnnnnnnnnnnnnnnnnnnnnnnnnnnnnnnnnnnnnnnnnnnnnnnnnnnnnnnnnnnnnnnnnnnnnnnnnnnnnnnnnnnnnnnnnnnnnnnnnnnnnnnnnnnnnnnnnnnnnnnnnnnnnnnnnnnnnnnnnnnnnnnnnnnnnnnnnnnnnnnnnnnnnnnnnnnnnnnnnnnnnnnnnnnnnnnnnnnnnnnnnnnnnnnnnnnnnnnnnnnnnnnnnnnnnnnnnnnnnnnnnnnnnnnnnnnnnnnnnnnnnnnnnnnnnnnnnnnnnnnnnnnnnnnnnnnnnnnnnnnnnnnnnnnnnnnnnnnnnnnnnnnnnnnnnnnnnnnnnnnnnnnnnnnnnnnnnnnnnnnnnnnnnnnnnnnnnnnnnnnnnnnnnnnnnnnnnnnnnnnnnnnnnnnnnnnnnnnnnnnnnnnnnnnnnnnnnnnnnnnnnnnnnnnnnnnnnnnnnnnnnnnnnnnnnnnnnnnnnnnnnnnnnnnnnnnnnnnnnnnnnnnnnnnnnnnnnnnnnnnnnnnnnnnnnnnnnnnnnnnnnnnnnnnnnnnnnnnnnnnnnnnnnnnnnnnnnnnnnnnnnnnnnnnnnnnnnnnnnnnnnnnnnnnnnnnnnnnnnnnnnnnnnnnnnnnnnnnnnnnnnnnnnnnnnnnnnnnnnnnnnnnnnnnnnnnnnnnnnnnnnnnnnnnnnnnnnnnnnnnnnnnnnnnnnnnnnnnnnnnnnnnnnnnnnnnnnnnnnnnnnnnnnnnnnnnnnnnnnnnnnnnnnnnnnnnnnnnnnnnnnnnnnnnnnnnnnnnnnnnnnnnnnnnnnnnnnnnnnnnnnnnnnnnnnnnnnnnnnnnnnnnnnnnnnnnnnnnnnnnnnnnnnnnnnnnnnnnnnnnnnnnnnnnnnnnnnnnnnnnnnnnnnnnnnnnnnnnnnnnnnnnnnnnnnnnnnnnnnnnnnnnnnnnnnnnnnnnnnnnnnnnnnnnnnnnnnnnnnnnnnnnnnnnnnnnnnnnnnnnnnnnnnnnnnnnnnnnnnnnnnnnnnnnnnnnnnnnnnnnnnnnnnnnnnnnnnnnnnnnnnnnnnnnnnnnnnnnnnnnnnnnnnnnnnnnnnnnnnnnnnnnnnnnnnnnnnnnnnnnnnnnnnnnnnnnnnnnnnnnnnnnnnnnnnnnnnnnnnnnnnnnnnnnnnnnnnnnnnnnnnnnnnnnnnnnnnnnnnnnnnnnnnnnnnnnnnnnnnnnnnnnnnnnnnnnnnnnnnnnnnnnnnnnnnnnnnnnnnnnnnnnnnnnnnnnnnnnnnnnnnnnnnnnnnnnnnnnnnnnnnnnnnnnnnnnnnnnnnnnnnnnnnnnnnnnnnnnnnnnnnnnnnnnnnnnnnnnnnnnnnnnnnnnnnnnnnnnnnnnnnnnnnnnnnnnnnnnnnnnnnnnnnnnnnnnnnnnnnnnnnnnnnnnnnnnnnnnnnnnnnnnnnnnnnnnnnnnnnnnnnnnnnnnnnnnnnnnnnnnnnnnnnnnnnnnnnnnnnnnnnnnnnnnnnnnnnnnnnnnnnnnnnnnnnnnnnnnnnnnnnnnnnnnnnnnnnnnnnnnnnnnnnnnnnnnnnnnnnnnnnnnnnnnnnnnnnnnnnnnnnnnnnnnnnnnnnnnnnnnnnnnnnnnnnnnnnnnnnnnnnnnnnnnnnnnnnnnnnnnnnnnnnnnnnnnnnnnnnnnnnnnnnnnnnnnnnnnnnnnnnnnnnnnnnnnnnnnnnnnnnnnnnnnnnnnnnnnnnnnnnnnnnnnnnnnnnnnnnnnnnnnnnnnnnnnnnnnnnnnnnnnnnnnnnnnnnnnnnnnnnnnnnnnnnnnnnnnnnnnnnnnnnnnnnnnnnnnnnnnnnnnnnnnnnnnnnnnnnnnnnnnnnnnnnnnnnnnnnnnnnnnnnnnnnnnnnnnnnnnnnnnnnnnnnnnnnnnnnnnnnnnnnnnnnnnnnnnnnnnnnnnnnnnnnnnnnnnnnnnnnnnnnnnnnnnnnnnnnnnnnnnnnnnnnnnnnnnnnnnnnnnnnnnnnnnnnnnnnnnnnnnnnnnnnnnnnnnnnnnnnnnnnnnnnnnnnnnnnnnnnnnnnnnnnnnnnnnnnnnnnnnnnnnnnnnnnnnnnnnnnnnnnnnnnnnnnnnnnnnnnnnnnnnnnnnnnnnnnnnnnnnnnnnnnnnnnnnnnnnnnnnnnnnnnnnnnnnnnnnnnnnnnnnnnnnnnnnnnnnnnnnnnnnnnnnnnnnnnnnnnnnnnnnnnnnnnnnnnnnnnnnnnnnnnnnnnnnnnnnnnnnnnnnnnnnnnnnnnnnnnnnnnnnnnnnnnnnnnnnnnnnnnnnnnnnnnnnnnnnnnnnnnnnnnnnnnnnnnnnnnnnnnnnnnnnnnnnnnnnnnnnnnnnnnnnnnnnnnnnnnnnnnnnnnnnnnnnnnnnnnnnnnnnnnnnnnnnnnnnnnnnnnnnnnnnnnnnnnnnnnnnnnnnnnnnnnnnnnnnnnnnnnnnnnnnnnnnnnnnnnnnnnnnnnnnnnnnnnnnnnnnnnnnnnnnnnnnnnnnnnnnnnnnnnnnnnnnnnnnnnnnnnnnnnnnnnnnnnnnnnnnnnnnnnnnnnnnnnnnnnnnnnnnnnnnnnnnnnnnnnnnnnnnnnnnnnnnnnnnnnnnnnnnnnnnnnnnnnnnnnnnnnnnnnnnnnnnnnnnnnnnnnnnnnnnnnnnnnnnnnnnnnnnnnnnnnnnnnnnnnnnnnnnnnnnnnnnnnnnnnnnnnnnnnnnnnnnnnnnnnnnnnnnnnnnnnnnnnnnnnnnnnnnnnnnnnnnnnnnnnnnnnnnnnnnnnnnnnnnnnnnnnnnnnnnnnnnnnnnnnnnnnnnnnnnnnnnnnnnnnnnnnnnnnnnnnnnnnnnnnnnnnnnnnnnnnnnnnnnnnnnnnnnnnnnnnnnnnnnnnnnnnnnnnnnnnnnnnnnnnnnnnnnnnnnnnnnnnnnnnnnnnnnnnnnnnnnnnnnnnnnnnnnnnnnnnnnnnnnnnnnnnnnnnnnnnnnnnnnnnnnnnnnnnnnnnnnnnnnnnnnnnnnnnnnnnnnnnnnnnnnnnnnnnnnnnnnnnnnnnnnnnnnnnnnnnnnnnnnnnnnnnnnnnnnnnnnnnnnnnnnnnnnnnnnnnnnnnnnnnnnnnnnnnnnnnnnnnnnnnnnnnnnnnnnnnnnnnnnnnnnnnnnnnnnnnnnnnnnnnnnnnnnnnnnnnnnnnnnnnnnnnnnnnnnnnnnnnnnnnnnnnnnnnnnnnnnnnnnnnnnnnnnnnnnnnnnnnnnnnnnnnnnnnnnnnnnnnnnnnnnnnnnnnnnnnnnnnnnnnnnnnnnnnnnnnnnnnnnnnnnnnnnnnnnnnnnnnnnnnnnnnnnnnnnnnnnnnnnnnnnnnnnnnnnnnnnnnnnnnnnnnnnnnnnnnnnnnnnnnnnnnnnnnnnnnnnnnnnnnnnnnnnnnnnnnnnnnnnnnnnnnnnnnnnnnnnnnnnnnnnnnnnnnnnnnnnnnnnnnnnnnnnnnnnnnnnnnnnnnnnnnnnnnnnnnnnnnnnnnnnnnnnnnnnnnnnnnnnnnnnnnnnnnnnnnnnnnnnnnnnnnnnnnnnnnnnnnnnnnnnnnnnnnnnnnnnnnnnnnnnnnnnnnnnnnnnnnnnnnnnnnnnnnnnnnnnnnnnnnnnnnnnnnnnnnnnnnnnnnnnnnnnnnnnnnnnnnnnnnnnnnnnnnnnnnnnnnnnnnnnnnnnnnnnnnnnnnnnnnnnnnnnnnnnnnnnnnnnnnnnnnnnnnnnnnnnnnnnnnnnnnnnnnnnnnnnnnnnnnnnnnnnnnnnnnnnnnnnnnnnnnnnnnnnnnnnnnnnnnnnnnnnnnnnnnnnnnnnnnnnnnnnnnnnnnnnnnnnnnnnnnnnnnnnnnnnnnnnnnnnnnnnnnnnnnnnnnnnnnnnnnnnnnnnnnnnnnnnnnnnnnnnnnnnnnnnnnnnnnnnnnnnnnnnnnnnnnnnnnnnnnnnnnnnnnnnnnnnnnnnnnnnnnnnnnnnnnnnnnnnnnnnnnnnnnnnnnnnnnnnnnnnnnnnnnnnnnnnnnnnnnnnnnnnnnnnnnnnnnnnnnnnnnnnnnnnnnnnnnnnnnnnnnnnnnnnnnnnnnnnnnnnnnnnnnnnnnnnnnnnnnnnnnnnnnnnnnnnnnnnnnnnnnnnnnnnnnnnnnnnnnnnnnnnnnnnnnnnnnnnnnnnnnnnnnnnnnnnnnnnnnnnnnnnnnnnnnnnnnnnnnnnnnnnnnnnnnnnnnnnnnnnnnnnnnnnnnnnnnnnnnnnnnnnnnnnnnnnnnnnnnnnnnnnnnnnnnnnnnnnnnnnnnnnnnnnnnnnnnnnnnnnnnnnnnnnnnnnnnnnnnnnnnnnnnnnnnnnnnnnnnnnnnnnnnnnnnnnnnnnnnnnnnnnnnnnnnnnnnnnnnnnnnnnnnnnnnnnnnnnnnnnnnnnnnnnnnnnnnnnnnnnnnnnnnnnnnnnnnnnnnnnnnnnnnnnnnnnnnnnnnnnnnnnnnnnnnnnnnnnnnnnnnnnnnnnnnnnnnnnnnnnnnnnnnnnnnnnnnnnnnnnnnnnnnnnnnnnnnnnnnnnnnnnnnnnnnnnnnnnnnnnnnnnnnnnnnnnnnnnnnnnnnnnnnnnnnnnnnnnnnnnnnnnnnnnnnnnnnnnnnnnnnnnnnnnnnnnnnnnnnnnnnnnnnnnnnnnnnnnnnnnnnnnnnnnnnnnnnnnnnnnnnnnnnnnnnnnnnnnnnnnnnnnnnnnnnnnnnnnnnnnnnnnnnnnnnnnnnnnnnnnnnnnnnnnnnnnnnnnnnnnnnnnnnnnnnnnnnnnnnnnnnnnnnnnnnnnnnnnnnnnnnnnnnnnnnnnnnnnnnnnnnnnnnnnnnnnnnnnnnnnnnnnnnnnnnnnnnnnnnnnnnnnnnnnnnnnnnnnnnnnnnnnnnnnnnnnnnnnnnnnnnnnnnnnnnnnnnnnnnnnnnnnnnnnnnnnnnnnnnnnnnnnnnnnnnnnnnnnnnnnnnnnnnnnnnnnnnnnnnnnnnnnnnnnnnnnnnnnnnnnnnnnnnnnnnnnnnnnnnnnnnnnnnnnnnnnnnnnnnnnnnnnnnnnnnnnnnnnnnnnnnnnnnnnnnnnnnnnnnnnntcacacatcacaaagaagtttctcagaattcttctgtctagtttttaggtgaagatgtttccttttccactataggcctcaaagtgctccaaatgtccacttgcagattatacaaaaagagagttaaaaaaccgctcaaacaaatgagaggtttaactctgtgagatgaattcacacatcacaaagaagtttctcagattggttctgtctacattctatgtgaagatatttccttttctaagataggcagcaaagcgttccaaatgtccacatgcagattctacaaaaagagtgtttccaaactgctgaatcaaaagaaaggatcaactcggtgagatgaacgcacgcatcaaagcgaagtttctcagaattcttctgtctagtttttatgtgaagatagttccttttccaccataggcttcaaagcactccaaatgtccacttgcagattctacaaaaagagtttcaaaactgttcaatcaaaagaaaggtttaactctgtgagacgaatgcacacattacaaagtattttctcagattgcttcagtctagattttatgtgaagatattttctcttataacataggccgcaaagcacacaaaatgtccacttgcagattctacaaaaagagtatttccaaactgctcaatcaaaaggaagtttcaactctgtgagatgaatgcacacaacacaaagaagtttctcagaattcttctgtctagtttttatgtgaagatatttcctttcccactataggcctcaaagcactcaaaatatccaatttcagattctgcaaaaagagagtttcaaaattcctcaatcaaaagaaaggtttaactctgtgagatgaatgcacacatcacaaagaagtttttcagaattcttctgtctagtctttatgtgaagatattttgttttccacaatgttcctcaaagccctccaaatgtccacttgcagattctatgaaaggagagttttgaaactcctcaatcaaaagaaggtttcactctttgaggtgaatgaacacttccctaagaagtttctcagattgcttctgtctagattttatgtgaaggtatttccttttctaacgtaggccggaaggtgttccaaatgtccacttgcagaatctacaaaaagagagtttccaaactgctaaatcaaagggaagattcaactgtgtgagatgaatgccagcatcacaaagatgtttctcagaaatcttctttctagtttttatgtgaagatatttccttttccaccataggcctaaaaacgattgcacacatcacaaagaagtttcccaggattcttctacctagtttttatttgaagatatttccttttcnnnnnnnnnnnnnnnnnnnncttcacataaaaactatgcagagcattctgagaaaccactttgtgttgcgtgcattcatctcacagagtagaagctttcttttgattgagcagttttgaaacactctttttgtagaatctgcaagaatatatttagagcgatttgaggcctattgtggaaagggaaatttcttcaaataaaaactacccagaagcattctgtgaaacttatttgtgatgtgtgctttcaactcacattgttgaacgtatctgttgattgagcagtttagaatctctctttttgtagaatctgcaagtgaatatttggaaccctatttcgccctagagtggaaaaggaaatatcttcaaatagaaactacacagaagcattcagagaaccttctttctgatgagtgcattcatcacagatttgaacctttgttttcatttagcagttttgagacaatctttccgtagaaactggaagtgaatatttggagggctttgagttctgttttggataaagggatatcttcatataaaaactacacagaagatttctgagaaacacttttgtgaggtgtgcactgaagtcagagtgttgaacctatcttttgattcagcagttttgaatctctctttttacagaacctgcgagtggatatttggagcgctttggggcttactgtggaaaatgaaatatcttcacacaaaaacttcacagaagcatcctgagaaacttctttgtgatgtgtgcattcatctcacagagttgaatgtctctgttgattgagcagttttgaaacactctttttgtagaatctgcaagtagatatttggagttcattggggcctactgtggaaacacaaatatcttcacataaaaactacacagaaggctgggcgcggtggctcacgcctgtaatcccagcactttgggaggccgaggcgggcggatcacgaggtcaggagatcgagaccatcctggctaacacggtgaaaccctgtctctactaaaaaaaaatacaaaaaattagccgggcgtggtagcgggcgcctgtagtcccagctactcgggagggtgaggcaggagaatggcgtgagcccgggaggcggagcttgcagtgagccgagatcgcgcctctgcactccagcctgggcgagagagcaagactccgtctcaaaaaaaaaaaaaaaaaaactacacagaagcattctgagaaacttctttgtaatgggtgcattcatctcacagagttgaatgtctctgttgagtgagcagttttgaaacactctttttgtagaatctgcaagtgggtatttggagctcattggggcctactgtggaaaaacaaatatcttcacataaaaactacacagaagcattctgagaaacttctttgtgatttgtgcattcatcttacagagttgaatctttcttttgatatagcagttttgaaacactctttttttagattctgcatgtggatatttggagccttttcaggcctatggtggagaaggaaatatgttcacataaaaactacgcagaagcattctgagaaactactttgtgatgtgtgcattcatctcacagagtagaacctttaatttgattgagcagttttgaaacactttttttgtagaatctgcaagtggatatttagagcgattcatggcctattgtggaaagggaaatttcttcaaataaaaactacccagaagcattctgtgaaacttatttgtgatgtgtgcattcaactcacattgttgatcgtatctgttgattgagcggtttagaatctctctttttgtagaatctgcaagtgaatatttggagccctatttcaccctatagtggaaaaggaaatatctccaaatagaaactacacagaaacattcagagaaccttctttctgatgagtgcattcatcatagggttgaacctttgttttgatttagcagttttgagacaatccgtagaatctggaagtgaatatttggagttatttgagttctgttttgtcgaacgagatatcttcatataaaagctacactgaagatttctgagaaacacctttgtgaggtgtgcattgaagtcacagtgttcaacctatcttttgattcagcagatttgaatctctctttttttgcagaatctgtgagtggatatttggagcgctttggggcctactgtgaaaaatcaaaaatcttcatataaaaactatacagaagcattttgagaaacttctttgtgaggtgtgcattcaactcatagagttgagcttatcttttctttcagaacttttatgtctctttttttgtagaatctgctagtggatatttggagctctttacaccttatggtggataaggaattatcttcacataaaaactatgcagaagcattcagagaaacttctttgttatgaatgcattcctcacacagagttggacctttgtttttattgagcagtattgaaaccctctttttgcagaatcaccaattggatattcagggagaattgaggcctgtttttgaaaatgaaatatcttcaagttaaaactacacagaagcattctgagaaacttgtttgtgatgtgtacattcaactctcagtgttgctcctatcttatgatttagcagttttgaaacattctttttgtagaatctgcaagtggatatttagagcgatttgaggcctattgtggaaaaggaaatatcttgtcataaaaactacacagaagcattctgagaaacttctttgggaagtgtgcattcaactaacagtgtggaacctatctttttgttgagcagcttagaatctctttttgtagaatctgcaagtggatatttggagccccatttcgccctatcgtggaaaactaaatatcttcacataaaaactacacagaagcattctgagaaacttctttgtgatgtttgcattcaactcacagagttgaacctaccttttgatagagcagtttcgaatctctctttttgcagaatctgcaagtgtatatttggaaagctttgaggcctattgtggaaaaggaaatatcttcacataaatactgcagagaagcattctgagaaacttctttgtgaggtgtggattcaaaccacagagttggacttgtcttttcattgaacagttttgaatgtctctttttgtagaatctacaagtggatatttggagccctttgcaacctgtggtggaaaaggaaataacttcaaataaaaactacacagaatcctacacataaacgtctttgtgatgagtgcattcattccacagtgttgaaccttcctttttactgagcagttttgaaacactatttttgcagaatcagcaagtggatatttggagagctttgatgcctattgtggaaaagggaatattttcaaataaaaactacacagaaacattctgagaaactactttgtgatgtgtgcattgaactcacagtgttgtacatgtcttttgtttgagcagttctgagtctctctttttgtagaatctgcaagtggatatttggagccctttgcggcctatggttgaaaagaaatatcttcaaataaaaactagacagaaggattctgagaaacgtctttgtgatgtgtgcattcaactcacagggttgaacctttcttatgattgagcagttttcaaaacctctttttgtagaatctgcaaatagctatttggagcgctttgaggcctactgtggaaaagcaaatatcttcacctaaagactacctggaggcattctgagaaacttccttgtgatgtgtgcattcatctcacagggttgaacttttcttttgatttagcagttttgaaacactctttctgtagaatctgcaagtggatatttggagcgatttgaggcctattgtggaaaaggaaatatcttcacataaaaactacacagaagaattctgggaaacttcttttttttttttttttttttttttttttttgagatggagtctcgctctgttgcccaggccggactgcggactgcagtggcgcaatctcggctcactgcaagctccgcttcccgggttcacgccattctcctgcctcagcctcccgagtagctgggactacaggcgcccgccaccgcgcccggctaattttttgtatttttagtagagacggggtttcaccttgttagccaggatggtctcgatctcctgacctcatgatccacccacctcggcctcccaaagtgctgggattacaggcctgatgggaaacttctttgtgatgtgtgcttccaactcacatagttgaacctatcttttgattgaaattctctttttgtagattcggcaagtggatatttggagccctttgcaacctatggtggaaaagtaaatatcttcaaataaataatacacagaagcattcagagaaacttctttgtggtgagtgcattcatcacagagagttgaatctttcctttgattgagcagttttgaaacactctttttgcaggatctgcaggcagatattttagagctttgaggccaaatgtggaaaaggaaatatcttcacataaaaactacacagaagcattctgagaaacttctttgtgatgtgtgcattcaactctcagtgttgaacgtatcttttgattcagcagttttgaatatctgttttgtaggatctgctagtgtatatttggagccctttgtggccaatggaaaaggacatatcatcaaatagaaactacatagaagcattctgagaaacgtctttgtgttgtgtgcattcatctcacagggttgaacacttcctttcatggagcagttttgaaacagtatttttccagaacctgcaagtggatatttggagagctttgagacctgttgtagaaaaggaaatatgttcaaataaaaactacacagaagtattcagaattcagagaaacttctttatgatgagtgcattcatcacagacttgaaactttcttttgattgagcagttttgaaactctccttttgtagaagatggaagtggatattttgaagtctttgaggcttattttggaaacggaaatatcctcacataaaaactacacagaagcattctgacaaacttctctgttatgtgttcattcaactcacagtgttgaacgaattttttgattgagcagttttcagtctctccttttgtagtatctggaagtggatatttggagctctttgcaccttgtgttggaaaaggaaatatcttcaaataaaaactacaaataagcattctgagaaacttctttgtgttgagtgcattcatcacacagagttgaaagtttcttttgattgagcagttttgaaacactcttttcatagaatctggaagtggatatttggagggctttgaggcctattttggaaaaggaaataacttaaaaactgcacagaatttttcggagaaactcctttgttatgtgtgcattcaacacgcagagttgagcctatcttttgattgagcagttttgaatctctctttttgcagaatctgcaagtggatatttttggtgctatgaggcctattgtggaaaagcaaatattttcaaataaaaattacacagaagcattctgagaaactttgttgtgaggtgtgcattcaactcacagagtcgaacccatcttttgattgagcagttttgaatctctctttttgcagaatctgcaagtggatatttggagggctttgtggcctattgtggaaaaggaaatatcttcacataaaaactacacagaggctttctgggaaacttctttgtgatgtgtgtattcaactgacagagttgtacttatcttttgattgagcagttttgaatctctctttttgtagaatctctaattggatatttggagcaatttgaggcctattgtggaaaaggaaatatcttcacatgaaaactacacagaggctttctgagaaaatgatttgcaatgtgtgcattcaactcagagttgaacatatcttttgattgagcagttttgaatctctctttttgtagcatctgcaggtggaattttggagccctttgtggcctatgttggaaaaggaaatatcttaaaataaaaactacacagaatcattctgggaaacatctttgtgatgagtgcattcatcacaaagggttgaatctttctannnnnnnnnnnnnnnnnnnnnnnnnnnnnnnnnnnnnnnnnnnnnnnnnnnnnnnnnnnnnnnnnnnnnnnnnnnnnnnnnnnnnnnnnnnnnnnnnnnnnnnnnnnnnnnnnnnnnnnnnnnnnnnnnnnnnnnnnnnnnnnnnnnnnnnnnnnnnnnnnnnnnnnnnnnnnnnnnnnnnnnnnnnnnnnnnnnnnnnnnnnnnnnnnnnnnnnnnnnnnnnnnnnnnnnnnnnnnnnnnnnnnnnnnnnnnnnnnnnnnnnnnnnnnnnnnnnnnnnnnnnnnnnnnnnnnnnnnnnnnnnnnnnnnnnnnnnnnnnnnnnnnnnnnnnnnnnnnnnnnnnnnnnnnnnnnnnnnnnnnnnnnnnnnnnnnnnnnnnnnnnnnnnnnnnnnnnnnnnnnnnnnnnnnnnnnnnnnnnnnnnnnnnnnnnnnnnnnnnnnnnnnnnnnnnnnnnnnnnnnnnnnnnnnnnnnnnnnnnnnnnnnnnnnnnnnnnnnnnnnnnnnnnnnnnnnnnnnnnnnnnnnnnnnnnnnnnnnnnnnnnnnnnnnnnnnnnnnnnnnnnnnnnnnnnnnnnnnnnnnnnnnnnnnnnnnnnnnnnnnnnnnnnnnnnnnnnnnnnnnnnnnnnnnnnnnnnnnnnnnnnnnnnnnnnnnnnnnnnnnnnnnnnnnnnnnnnnnnnnnnnnnnnnnnnnnnnnnnnnnnnnnnnnnnnnnnnnnnnnnnnnnnnnnnnnnnnnnnnnnnnnnnnnnnnnnnnnnnnnnnnnnnnnnnnnnnnnnnnnnnnnnnnnnnnnnnnnnnnnnnnnnnnnnnnnnnnnnnnnnnnnnnnnnnnnnnnnnnnnnnnnnnnnnnnnnnnnnnnnnnnnnnnnnnnnnnnnnnnnnnnnnnnnnnnnnnnnnnnnnnnnnnnnnnnnnnnnnnnnnnnnnnnngtttctcagaaatcttctttctagtttttatgtgaagatatttccttttccaccataggcctaaaaacgattgcacacatcacaaagaagtttcccaggattcttctacctagtttttatttgaagatatttccttttccaccataggcatccaagctctccaaatgtccatttgcagattctacaaaaagagagtttcaaaactcccaatcaaaagaaatgtttaaatttttgaggtgaatgcacacatcagaaagaagtttctcagaaatctactgtctagtttttatgtgaagatatttccttttccatcataggcctcaagacactccaaacgtccacttgctgattcttcaaaaagagagtttcaaaattgctccataaaaagacaattttaactctgtgagatgaatgcacacatcataaagtagtttctcagattgcttctgtcttgatttaatgtgaaaatattcctttttattcaataaactgcaaagctctccaaaagtccactagcagctttgacaaaaagactgtttccatactgctcaagaaaataaaggttcaactttgtgggatgaacgcacacatcacaaagaagtttctcagaatttttctgcctattttttatgtgaagatatttccttttccaccataggcctccaagtactccaaatggccacttgcagattctacaaaaagagagtttcagaactgctcaatcaaagaaaggtttagctctgtgagatgaatgcacacatcacaaaaactttctcagattgcttttgtctagattttaggtgaagacatttcctattccaccataggatgcaaagtgttacaaatgtccacttgaagattatacaaaaacagtgtctgcatactgctcaatcaaaagaaagattcatctccatgagataaatgcacacatcacgaagaggtttctcagaattctcctctctagtttttatgtgagtatatttttttccgccatagacctcaaagcgcttcaaatgtccacttgcagattctacaaaaagagagtttcaaaactgcttaatcaaaagaaaggtttaactctgtgggatgaatgcacacatctcaaaaaagttccccagattgcttctgtctagattttatgtgaagatgtttccttttataccataggctgcaaagcgctccaaatgtccaattgcagattctacaaaaacagtgtttccaaactgctcaatcaaagcaaaggttgaactttgtgagatgaatgcatacatcacaaacaagtttctcagaattcttctgcctattttttattttaagatatttccttttccaccatgggcctcaaagtgctccaaatgtccacttacagattctacaaaaacacagtctccatactgctcaatcaaaagaaagtttcaactccgtgagaggaattcacacatcataaagcggtttctcagaattcttctgtcttgtttttttgtgaagatatttccttttcaaccatacgcctcaaagtactccaaatgtctgcttgcggcttctacaaaaagagagtttccaaaatacacaatcaaaaaaatggtttaattctgtgagttgaatgcacacatctcaaagaagcttatcagattgcttctgtctagatttttttactaccataggctgcaaagcgctccaaatgtccgatagcagattctacaaaaagaatgtttccaaactgctcagtcaaaggaaaggttctactctgcgagatgaatgcacacatcaccaagaagtttctcagaattcttctgcctagtttttatgttatttccttttccaccatggtcctcaaagcactccaaatgtaagcttgcagactctacaaaaagagagctttgaatctcctcaatcaaaggaaagttttaactctttgaggttaatgcacacatcacaaaggagtttctcagattgcttctgtctagatgttatgtgaggatcttacttgttctgacataggctgcaaagtgctccaaatgtccacttgcagaatctactaaaagattgtttccaaaatgctgaatcaaaagataggttcaactcggtgagatgtacctacacataacagggaagtttcttagaattcttctatctagtttttatgtgaagatatttcgttttctgccatagtcctcaaagcgcttcaaatgtccacttgcatattctacagaaagagagcctgaaaactcctcaatgaaaagaaatatttaacacagtgagatgaatgcacacatcgcaaattagtttctcagattgcttctgtctagattttatgtgaaggtatttccttttttaacataggcgacaaggtgaactaaatgtccacttgcagattctacagaaagagtgtttccaaactgctctatcaaaagaaaggttcaactctgtgaggtaaatgcacacatcacaaagaagtttctcagaattcttctgtctagtatttatgtgaagatatttccttttctaccatagacctcaaagtgctccaaatgtccacttgcagattctacagaaagagaatttcaaaactgctcaatcaaaagaaaggtttaactctgtgagatgaatacacacataacaaagaagtttcacagattgcttttgtctagattttttgtgaagatattttcttttctgccattggccgcaaagcactccaaatatgcacttgcagattctacaaaaacattgtttccatactgctcaatcaaaagaaagtttcaactccatgagatgaacgcacatatcacaaagaggtttctcagaattcttctctctagtttttatatgaagatgtttccttttccaccataggcctccaagtactccaaacatccacttgcagattctacaaaaagagagtttcaaaactgctcaatcaaaagaaagttttaactctgtgggatgaatgcatacttctcaaagaagtttctcacattgctactgtctaggttttaagtgaagatttttccttttctaccataggccacaaagcactccaaatgtccagttgcagattctacaaaaagagtgtttccaaactgctcaactgaaggaaaggttcaactttgtgagattaacgcacacatcacaaaggagtttctcagaattcttctgcctattttttattttaagatatttccttttccaccatggccacaaagcactccaaatgtccacttgcggattctacaaaaatagtgtctacatactgctcaatcaaaagaaagtttcaactccgtgagaggaatgcacacaacacaaagcagtttctcagaattcttctgtcttctttttatgtgaagatatttccttttccatcatacacctcaaagtactccaaatgtctgcttgcggcttctacaaaaaagagtttccaaactgctcaatcaaaaaaaaaggtttaactctgtgagttgaatgcacacatctcaaagaagtttctcagattgtttctgtctagattttatgtgaagattttttttttttactaccataggctgcaaagcgctccacatatccaattgcagattccacaaaaagagtgtttccaaactgctcagtcaaaggaaagttctactctgtgagatgaatgcacacatcaccaagaagtttctcagaattcttcggcctagtttttatgttaacatgtttccttttccgccatggtcctcaaatcgttccaaatgtccccttgaagactctacaaaaagagagctttgaatctcctcaatcaaaggaaagttttaactctctgaggttagtgcacacatcacaaaggagtttctcagattgtttctgtctagatattatgtgaagatcttatctgttctgacataggctgcaaagcgctctaaatgtccacttgcagaatctgctaaaagaatgtttcaaaaatgctgaatcaaaagaaaggttcaactcggtgagatgtacctacaattaacagggaagtttctcagaattcttctatatagtttttatgtgaagatatttccttttccaccgtagtactcaaagcacttcaaatgtccacttgcatattctacagaaagagagcctgaaaactcctcaatgaaaagaaatatttaacactgtgagagaagtgcacacatcacaaagtagtttctcagattgcttctgtctagattttatgtgaaggaatttccttttctaacataggccacaaggtgctccaaatgtccacttgcagattctacaaaaagagtgtttccaaactgctctatcaaaagtaaggttcaactctgtgatgtgaacgcacacatcacaaagaagtttctcagaattcttctgtctggtatttatgtgaagatatttccttttccaccgtagacctcaaagcgctccaaatatccccttgcagattctacagaaagagaatttcaaaacagctcaatcaaaagaaaggtttaacactgtgtgatgaatgcacacatcacaaagatgtttcccagattgcttttgtctagattttatgtgaagatatttccttttctgccataggccaaaaagcactcaaaaaatgcacttgcagattctacaaaaacattgtttccatactgctcaatcaaaataaagtttcagctctgtgagatgaacgcacacatcacaaagaggtttctcagaattcttctctctagtttttatgtgaagatatttccttttccaccataggcctccaagtactccaaatggccacttgcagattctacttatagagagtttccaaactgctgaatcaaaagaaaggcttaactctgtgagatgaattcacacatctcaaagaagtttctcagaatgcttctgtatagattttatgtgaagatatttccttttctatataggccacaaagcactccaaacgtccacttgcagaatctacaaaaagagtgtttccaaactgctgaatcaaaagaaagtttcactctgatggaagtttcttttactgtgcagaagctctttagtttaattaaatcccatttgtcaattttggcttttgttgccattgcttttggtgttttagacatgaagttcttgcccatgcctatgtcctgaatggtaatgcctacgttttcttctagggtttttatggtttcaggtccaaagtttaagtctttaatccgtcttgaattaattttttataaggtgtaaggaaggaatccagtttcagttttctacatatggctagccagttttcccatcaccatttattaaatagggaatcctttccccattgcttgtttttctcaggtttgtcaaagatctgatagttgtagatatgtggcgttatttctgagggctctgttctgttccattgatctatatctctgttttggtaccagtaccatgctgttttggttactgtagccttgtagtatactttgaagtcaggtagcatgatgcctcctgctttgttcttatggcctaggattgacttgtgatgcaggctcttttttggttccatatgaactttaaagtaggtttttttccaattctgtgaagaaagtcattggtagcttgatggggatggcattgaatctataaattactatggcctttttcacgatattgatccttcctacccatgaggatggaatgttcttccatttgtttgtatcctcttttatttcattgagcagtggtttgtagttctccttgcagaggtccttcaagtcccttgtaagttggattcctaggtattttattctctttgaagcaattgtgaatgggagttcactcatgatgtggttctctgtttttctgttattggtgtgtaagaatgcttgctacttttgtacattgagtttgtatcctgagactttgctgaagttgcttatcaacttaaggagattttgggctgagactatggggttttctagatatacaatcatgtcgtctgcaaacagggaaaatttgacttcctcttttcctaaatgaatacactttatttccttctcctgcctaattgtcctggccagaacttccaacactatgttgaataggagtggtgagagagggcatccctgtcttgtgccagttttcaaagggaatgcttccagtatttgcccattcagtaggatattggctgtgggtttgtcatagatagctcttattattttgagatatatcccatcaatacctaatttattgagagtttttagcacgaagggttgttgaatgttgtcaaaggctttttctgcatttgttgagataatcatgtggtttttgtctttggttttgtttatatactggattacatttattgatttgcaacccacaaaatgggagaaaatttttgcaacctagtcatctgacaaagggctaatatccagaatctacaatgaactcaaacaaatttacaagaaaaaaacaaagaacaccatcaaaaagatggtgaaggacatgaacagacacttctcaaaagaatacatttatgcagccaaaaaacacatgaaaaaatgctcaccttcactggccatcagagaaatgtaaatcaaaaccataatgagatatcatcgcacacccattagaatggcaatcattaaaaagtcaggaaacaacaggtgctggagaggatgtggaaaaataggaacacttttacactgttggtaggactgtaaacaagttcatccattgtggaagtccatgtggcgattcctcagggatctagaactagaattaacatttgacccagccatcccattactgggcatatacccaaaggactgtaaatcatgctgctataaagacacatgcacacgtatgtttattgcagcactattcacaatagcaaagacttggaaccaacccaaatgtccgacaatgatagactggattaagaaaatgtggcacatatacaccatggaatactatgcagccacaaaaaatgatgagtttatgtccttcgtagggacatgatgaaattggaaatcatcattctcagtaaactatcgcaagaacaaaaaaccaaacaccacatattctcactcataggtgagaattgaacaatgagaacacatgaacacaagaaagggaagatcacactcttgggactgttgtggggtcgggggaggggggagaaatagcattgggagatatacttaatgctagatgacgagttagtgggtgcagcgcaccagcatgtcacatgtatacatatgcaactaatttgaatattgtgcacatgtaccctaaaacataaagtatactaataaaaaaaggaaaggttcaactctgtgagatgaatgcatacatcacaaagaagttactcagattgcttctgtctagattttatgtgaagatatttccttttctaccataggccccaaagcgttccaaatgtgcacttgcagattctacaaaaagagtgnnnnnnnnnnnnnnnnnnnnagtttctaagaattcttccatctagtttttatgtggagatatttcctttcccactataggcctcaaatcgctccaaacgtccaattgcagattctacaaacagagagtttcaaaacacctcaatcaaaagaaatgtttaactctctgagatgaatgcacacatcagaaaaagtttctcagattgcctctgtctagattttatgtgaagatatttccttttctgccataggccacaaatcgcttcaagtgtctacatgcagtttccaaactgttcaatcaaaagaaaagttcaactctgtgagatgaaagcacacatcacaaagaagtttcccagattgcttctgtctggattgtatgtgaaggtatttccttttctaccataggccacaaagtgttccaaatgtccaactgcagatactacaaaaagagtgtttccaatctgctcattcaaaagaaaggtttaactctgtgagataaatgaacacatcacaaaagagtttctgagttgtttctgtctagattttacatgaagatatttccttttctaccataggccacagagcagtccaaatgtccacttgcagattgtacaaaaagagggtttccaaactgctccatctaaagaaagtttcaactctgtgagataaattcacacatcacaaagaagtttctcagagttcttctgtttagtttttctgtgtagatatttcattttccaccatagtcctcaaggcgctagaaatgtccaattgcagattctacaaaaagagtacttcaaaactagtacatcaaaagaaagtttcaactctgggagacgaaggcacacattacaaagaagtttcccagaatgtttctatgtggtttttatgtgaagatatttccttttccaacataggcctcaaagagcttcaaatgcccacttgcagattctacaaaaagagggtttcaaaactgctcaagaaaaacaaagttttaacactgtgagatgaaagcacacaccacaaagttttttagattgcttgtgtctagattttatgggaaggtatttccttttctaccatagcctgctaagcactccaaatatccacttccagattctacaaagagtgtttccaaactgcataatcaaaagaaaggttcagctctgtggtataaacgtacacatcacaaagcagtttctcagcattcttctgtctagtttttatgtgaagatacttcctactccaccataggcctcaaagcgctccaaatgtccacttgcagattccagagaaagagagtttcaaaacggctcaaccaaaagaaaagtttaactctgtgagatgaatgcacatatcacaaagaagtttctcaaattgcttcagtctagattttatgtgaagatattgccttttctaacataggccacaaagcgctccaaatgtccacttgcagattctacaaaaagagagtttcaaaactgctccatcaaaagaaagactcaactatgtgagatgaatgcccacatcacaaaaaagtttctcagattgattctgtgtagattttatgttggatatttcattctttctaccataggccgcaaatcgctcaaaatatccacttgcagattctaaaaaaagagtgttttgaaactgctctatcaaaagaaaagttcacctctctgagatgaacgcacacatcaagaagaagttcgtcagaattattctatctggttttcatgtgaatatatttccttttccatcataggcctcaaagacctccaaatgtccacttgtagattctacaaaagagagtttcaaaactgctcaatcaaaagaaatatttaaatctgtgagatgaatgcacacattgcaaagaagtttctcagattgcttcagtctagattttatgtgaaaatatttccttttccatcataggtcacaaagcgctccaaatgtccacttgctgattctacataaagagtgtttccaaacagctgaataaatagaaagattcaactccgtgagatgaacgcacacatcacaaagcagtttctcagaattcttctgtctagtttttacgtgaagatatttccttttcaaccatacgcctcaaggcgctcaaaatgtccacttgcacattctataaaaagaatatttcaaaactggtcctttgaaagaatatttcagctctgggagatgaatgcacacatcacaaagaagtttttcagaatgcttctatcaagtttttatgtgaagatatgtccttttctaccataggcctaaaagtgctccaaatgtacacttgcagattctataaaaagagagtttcaaagctgctcaatcaaaagaaagggttaactctgtgagataaatgcacacatcacaaagaagtttttcagattgcttctttctatatttgatgtgtagatatttcctttttaccattggctgcaaagcgcaccaaatgttcatttgcagattctacaaaaagagtttttccaaactgctcaatcaaaagaaaggttcaactccgtgagatgaacacacacatcacaaagaagttttccagaattcttctatctagtttttatgtgaagatatttccttttccaccacaggtatcaaagtgttccaaatgtccacttgcagaatctagaaatagagattttcaaaactgctcaaccaaaagaaaggtttaacgctcttagatgaatgcacacatcacaaagaagtttctcagattgcttctgtctagattttatgtgaagatatttccttttctaacataggccacaaagcgttccaaatgtccacttgcagtttctacaaaaagagtgtttccaaactgctcaatcaaaagaaagtttcaattctgtgagatgaatgcacacatcatgaagaagtttctcagaattcttctgtctagtttttatgtgaacatatttccttttgcaccataggcttcaaagggctccaaatgtccacttgaagatcctacaaaaagagaggttcaaaaatgatcaatcaaaagaaatgtgtaactctctgagatgaatgcacacatcacaaataagcttctcacattgtttctgtctagattttatgtgaagttatttacttttctcccataggacacaaagagttctaattgcccacttgtagattctacaaaaagagtatttacaaattgcgcaatgaaaagaaagactcaactctctgagatgaacgcacacatcacaaagaagtttattagaattcttctgtttagtttttatgtgatagtatttccttttccaacataggactcagagtgctccaaaagtccacctgcagattctgcagaaagagagtttctaaagtgctcaatcaaaaaaaaaaaggtttaactctgtgagatgaatgcacacattacaaagaagtttctcatattgcttcggtctagagtttatgtgaaaatatttcctttactttttgatggggttgtttgtttttttcttgtaaatttgtttgtgttcattgtagattctggttattagctctttgtcagatgagtaggttgcgaaaattttctcccattttgtaggttgcctgttcactctgatggtagtttcttttgctgtgcataagctctttagtttaattagatcccatttgtcaattttggctttggttgccattgcttttggtgttttagacatgaagtccttgcccatgcctatgtcctgaatggtaaagcctaggttttcttctagggtttttatggtttcagatctaacgttgaaggctttaatccatcttgaattgatttatgtataaggtgtaaggaagggatccagtttcagctttctacttatggctagccagttttcccatcaccatttattaaatagggaatcctttccccattgcttgtttttctcaggtttgtcaaagatcagatagtggtagatatgtggcattatttctgagggctctgttccgttccattgatctatatctctgttttggtaccagtaccatgctcttttggttactgtagccttgtagtatagtttgaagtcaggtagtatgatgcctccagctttgttcttttggcttaggattgactcggtgatgccagctcttttttggttccatatgaactttaaagtagttttttccaattctgtgaagaaagtcattggtagcttgatggggatggcattgaatctgtaaattaccttgggcagtatggccattttcacgatattgattcttcctacccatgaggatggaatgttcttccgtttgtttgtatcctctttatttccttgagcagtggtttgtagttctccttgaagaggtccttcacatcccttgtaagttggattcctaggtattttattctctttgaaacaattgtgaataggagttcacttatgatttggctctctgtttgtctgttgttggtgaataagaatgcttaaagtgggctaaggacatgaacagacacttctcaaaagaagacatttatgcaagcaaaaaaaacatgaaaaaatgctcaccatcactggccatcatagtaatgcaaatcaaaaccacaatgagatatcatctcaaaccagttagaatgacaatcattaaaaagtcaggaaacaacaggtgctggagaggatgtggagaaataggaacacttttacattgtttgtgggactctaaactagttcaaccattgtggaagtcagtgtggcgattcctcatggatctagaactagaaataccatttcacccagccatcccattactgggtatatacccaaaggactataaattatgctgctataaagacacatgcatatgtatgtttattgtggcactattcacaatagcaaagacttggaaccaacccaaatgtccaacaatgaaaggctggattaagaaaatgtggcacatatacactatggaatactatgcaaccataaaaaatgatgagttcatgttctttgtagggacatgatgaaattggaaatcatcattctcagtaaactatcaaaagaacaaaagacaaaacaccacatattctcactcataggtgggaattgaacaatgagaacacatggacacaggaaggggaacatcacacttttgggcctgttgtggggtggggggaagggggagggacagcattgggagatatatctaatgctagacgatgagttagtgggtgccgcacaccagcatgtcacatgtatacatatgtaactaacatgcacattgtgcacatgtaccctaaaacttaaagtataataataaaaaataattaaaaaaaagaaaatatttccttttctaccataggccacaaagcgctccaaatgtccacttgccgattctacataaagagtgtttccaaactgctgaatagaaagaaagtttcaattccctgagatgaacgcacacatcacaaagcagtttctcagaattcttctgtctagtttttatgtgaagatatttcctttacaaccatacgcctcaaggcactcgaaatgtccacttgcacattctataaaaagaatatttcaaaactggtccttcaaaagaatgttttaactctgggatatgaatgcaaacattacaaagtagtttgtcagaatgcttctatcaagtttttatgtgaagacatttccttttctaccataggcctaaaagtgctccaaatgtacacttgcagattctataaaaagagagtttcaaaactgctcaatcaaaaaaaaaaaaaagagttaactctgtgagatgaatgcatacatcacaaagaagtttctcagattgcttctttcgagatttgatgtgtagatattcccattttacctttggccgcaaaacgcaccaaacgttcatttgcagattctacaaaaagagtttttccaaactgctcaatcaaaagaaaggttcaactccgtgagatgaacacacacgtcacaaagaagtttcccagacttctgtctagtttttatgtgaagatatttccttttccatcgcaggtctcaaagtgctccaaatgtccacttgcagattctacgaaaagagattttcaaaactgctcaaccaaaagaaatgtttaactccgttagatgaatgcacacatcaaaaagaagtttctcagattgcttctgtctagattttatgtgaagatatttccttttctaacatgggccacaaagcgttgcaaatgtccacttgcagactctacaaaaagagtgtttccaaactgctcaatcaaaagaaagtttcaattctgtgagatgaacgcacacatcatgaagaagtgtctcagaatacttctgtctagtttttatgtgaagatattaccttttgcaccataggcctcaaagggctccaaatgtccacttgaagatcctacaaaaagagaggttcaaaaatgatcaatcaaaagaaatgtgtaactctctgagatgaatgcacacatcacaaataagcttctcacattgtttctgtctagattttatgtgaagttatttacttttctaccataggcagcaaagtgttctaattgtccacttgtggattgtacagaaagagtatttccaaactgctcaatccaaagaaagactcaactctgtgagatgaacgcacacatcacaaagaagtttcttagaattcttctgtttagtttttatgtgatggtatttccttttccaacataggattcagagtgctccaaaaatccacctgcagattctgcaaaaagagagtttctaaagtgctcaatcaaaagaaaggtttaattcagtgagatgaatgcacatattacaaagaagtttctcagattgcttcagtgtagattttatgtgaaaatatttccttttctatcataggccaccaagcgctccaaatgtccacttgccgattctacataaagagtgtttccaaactgctaaatcaaaagaaaggttcaattccgtgagatgaacgcacacatcacaaagcagtttctcagaattcttctgtctagtttttatgtgaaaatatttccttttcaatcatatgcctcaaggcactcgaaatgtccacttgcacattctataaaaagagtatttcaaaactggtcctttgaaagaatgtttcaactctgggagatgaatgcacacatcacaaagaagtttgtcagaatgcttctatcaagtttttatgtgaagacatttccttttctaccgtaggcctgaaagtgctccaaatgtccactcgcagattctataaaaagagagtttcaaaactgctcaaaagaaagggttagctctgtgagatgaatgcacacatcacaaagaagtttctcagattgcttctttctagatttgatgtgtagatattccctttttaccattggccgcaaagcgcaccgaatgttcatttgcagattctacaaaaagagtttttccaaactgctcaatcaaaagaaaggttcaactcagtgagctgaacgcacacatcacaaagtagtttcccagaattcttctgtctagtttttatgtgaagatatttcctttcccaccacaggtctcaaagtgctccaaatgtccgcttgcagattctacgaaaagagattttcaaaactgctcaatcaaaagatagttttaactctcttagatgaaaacacacatcactagcaagtttctcaggttgcttctgtctggattttttgtgaagatattttctttcctaccataggccccaaagaactccaaatgcccacttgcagatccacaaaaagagtgtttccaaactgctcaatcaaaagaaaggttcaactctgtgagatgaacgcacacatcacaaagaagtttctcagaattcttctgtctagtttttatctgaagatattttcatttccaccagaggccttgaagccctccaaatatccacttgcagattctacaaaaagagagtttcaaaacttctcaatcaaaagaaagctttaacactctgaggtgaatgcacacatcacaaagaagtttctctgatttcttatgtccagattttatgtgaagatagtccctttgctaccataggtggcaaagcactccaaatgtccacttgcagattctacaaaaagacagtttccaaacttctcaatctaaagaatggttcaactctgtgagacgaacacacacatcacatagaagttgctcagaatacttctctctagtttttttgtgaggatatttcattttccacaataggcctcaaggtgctcaaaatgtccacttgcagattcaacaaaaaaagtatttcaaaactgatccatcaaaagaaagcttaaattctgggagatgaatgcacacatcatgaagaaatttctcagatttcttctgtgtagattttatgtgaagatatttccttttctaccataggccacaaagcactccaaatctccacttgcaggttctaaaaatgtagtgtttccaaactgctcattgaaaagaaaggttcaactctgtaagatgaacgcacacataacaaggaagtttctcagaattcttctgtctggtttttatgtgaagatattttcttttccaccataggcctcaaggcgcttgaaatgtccacttgcagattctacaaaaagtgtatttcaaaactggtccttcaaaagaaaggttcaactcttgagatgaatgcacacatcacaaagaagtttctcagaatatttctatctggtttttatgtgaagatatttccttttccaccataggcttcaaatcacaccaaatgtccacttacagattctacaaaaagagagtttcaaaactgctcaatcaaaagaaaggtttaactctgtgagataaatgaacacatcacaaggaagtttctcagattgcttctgtctagattttatgtgaagatatttccttttccagcataggcctcaaggtgcacgaaatgtccgcttgcagattcttcaaaaagaggatttcaaaagtggtccttcaaaagaaagattcaaatttgagatatgaatgcacacatcacaaagaggttcctcagaatgcttctgtccagtttttatgtgaagatattttctttttcaccataggcctcaagacgctcgaaatgtccacttgcagattatacaaaaagagtatttcaaaactggtccttcaaaagaaatgctcaactcagggagatgaatgcacatatcataaggaagtttctcagaaagcttctacctggttttcatttgaagatatttccttttacaccataggcttgaaagtgctccaaacgtccacttgcagattctacaaaaagagagtttcaaaactgctccatcagaagaaaggttcaactctgtatgatgaacgtacgaatcacaaagaagtttctcagaattcttctgtttagttttcatgtgaaggtatttccttttccactatagaccgcatatcactccaaatgtccagttgcagaatctacaaaaagagagtttcaaaactgcttcatcaaaagaaatgtttaactctgtgaggtgaatgcacacatcagaaagaagcttctcagattgcttctgtctagattttatgtgaagacatttcctttgttaccataggctgcaaagcgctccaaatgtccacttgcagattctacaaaaagagtgtttgaaaactgctcaatcaaaagaaaggttcaactctgtgagatgaacgcacacaccacaaaaaaatttctcagatttcttctgtcttgttcttatgggaagatatttccttttccaccataggccttaaagcactcccaatttcttattgcagattcaacaaaaagagtttcagaactgctcaatgaaaaggaaggtttcactctctgagatgaatgcacacatcacaaagaagtttctcagattgcttctctctagattttatgcaaagatatttccttttccaccgtaggcctcaaagcgctccaaatgtccacttgcagattctaccaatagtgcatttccaaaatgctcaatcaaaggaagttttaagtatgtgagatgaatgcacacatcgcaaagaagtttctcagtttgcttctgtctagattttatgtgaagatgtttccttttctaccaaaggcctcaaagctctcaaagtgtccacctgtagattctacaaaaggagtatttcaaaactgctcaatcgaaaaatctccaactctgtgagattcatggatacatcacaaagaattttctcagaatgcttctgtctagttttcatgtgaagctatttccttttccaaaaaaggcctcaaagcactccaaatatccacttgcagattctaaaaaagaatgtttcaaaactgctcaacataagaaaatttcaactctgtcacttgaatgtacacatgacaaaggagttgctgagaatgtttctgtctagtttttatgtgaagatattaccttttccactataggcagtatagcactccaaatgtccgcttgcagattctacaaaaagagtgtttccaaactgctcaatcaaaagaaagtttcgagtctgtgaggtgagtgcacacatcataaggaagtttctcagaatgcttctgtctagtttttatttgaagatatttccttttccaccatagacctctaagcgttctaaatgaccaattgcagattctacaaatgagtttttcaaaactgctcaatcaaaagaaaggttcaactctttaagatgaatacacatatcacaaagaattttctcagaatgattatatcttgtttttatgtgaagatatttccttttccaccataggccccaaagcgatccaaatgtacactttcagatactacaaaaagagtgttccaaaactgctcaatcaaaagaaagtttcacctttgtgagatgaatgcacacatcacaaagaagtttttcagaatgtttctgtagagattttatgttaagatatttacttttccaccatagacctcatagcactccaaatgtccacttgcagggtctaccaaaagagtgtttcaaagctactcaatcaaaagaaagtttcaactctgtgagatgaatgcacacatcacaaagtagtttctcagaatgcttctatttattatgtgaagatatctctttttccaacttaggtcttaaagcactccagacgtccacctgcagattctacaaaaagaatgtttcaaaactgctcaatcgaaagtaaagttccactctgtgagttgaatgcacacctcacaaagaagtttgtcagaattcttctgtctagttttatgtgaagatatttccttttccaccataggcctgaaagcgctccaaatgaccaattgcagattctaaaaatgagtttttcaaaactgctcaatcgaaagaaaggttcaactctctaagatgaatgcacatatcacaaagaattttcacagaatgattctgtctagtttttatgtgaagatatttccttttccaccataggccccaaagcgatccaaatgtacactttcagatactacaaaaagagtgttccaaaactgctcaatcaaaagaaagtttcagctttgtgagatgaatgcacacatcacaaagaagttcctcagaatatttctgtagagattttatgttaagttatgtacttttccaccatagacctcatagcactccaaatgtccacttgcagggtctaccaaaaaagtgtttcaaagctgctcaatcaaaagaaagtttcaactctgtgagatgaatgcacacatcacaaagtagtttctcagaatgcttctatttattatgtaaagatatctcattttccaacttagttctcaaagcaccccagatatccacctgcagattctacaaaaagagtgtttcaaaactgctcaattgaaagtaaagttcaactctgtgagatgaatgcacacctcacaaagaagtttgtcagaaatcttctgactagtttttatgtgaggatatttccttttccaccatagtcctcaaagcgctccaaatgtcctattgtagattctacaacaagagtgtttcaaaacagttcagtcaaaactaaggttcacttctgtgagatgaatgcacacatcacaaagaaggttttcagaatgcttccgtctagcacttaagtgaagatattttcttttccaccatatgcctcaaagctctccaaatatcctcttgcaaattctacaaaatgtgtttcaaaactgatcaatcaaaagaaagttccaactctgtcaggtgaatgcacacatcccaaagaagtttgtcagaatgattctgtctagttttaatgtgaagatgtttccttttccacactaggcctcacagtactcaaaatgtccacctgcagattctgcaaaaatagtttttccatactgctcaatcaaaagaaaatttcaacactgtgaggtgaatgcacacatcacagataagtttatcagaatgcttctgtctagtttttatgtgatgatatttccttttccaccgtaggcctgaaaactctccaaatatacacttgcagattctacaaaaacgtgtttcaaaacagctcaatgaaaagaaagtttcaaatctgtgagatgaatgcacacatcacaaagaagtttgtcagaatgtttctgtatagtttttatatgaagatattcccttttccaccataggcttcgaagcactccaaatttccacatgcagattgtacaacgtgtttcaaagctgttcaatcaaatcaaaggttcaaacctgtgagatgaatgcacacatcacaaagaaatttgtcagaatgcttctgtctagttattgtgaagatatatccttttccatcataggtctcaatgcacgccaaatgtccacttacagatagtataaaaagggtgtttcaaaactgctgaatcaaaagaaagtttcaactctttgagatgaatgcacatatcacaaagaagtttgtcagaatgcttctatctagttttcatgtgaagattttttttaaatatgcctcaaatccctccaaatgtccacttgcaaattctacaaaaagagtgtttccaaactgctcaataaaaagtaagattcaactctgtgagaagaacgcacacatcacaaagaagtttctcagaatgcttctgtctaggttttatgtaaagatatttacttttccaccataggcctcaaagtgctccaatccactccaatgcattccattctgtcccattccattccactccataccactccactccaccccactgcactccatcccactccattccattccgttccattccattcatttattttgacaggatctaactctgtnnnnnnnnnnnnnnnnnnnntccactccactccactcccttccattccatcccatcgcattcaactccactccactccactacagtacagtagactaaactacactcccttccattccattccataccacaccactccattccattccactcctttctttcgacaggatctcactctgtcacccaggctggagtgcagtggagcaatctcagctgatatttcacttcagcattccattgcattccattccattccattccataacattccactgcactccactccacttcactccactcaactccattccattccatccactccattccactataaacccctccaatccactccactccattccaaaccatcccattacattccactctattcctctccactccactccactccactctattccattccatttcattccattcctttctttcgacaggatctcactgtgtcacccaggctggagtgcagcagcagtatctcagctcacatttcatttcaccattccattccattccattccattccactccaatcctttccattccattccattccattccattccattccattctgttacattccattccactccattccagtccactctactccattccactccattccattgaatcccattctattccactccattccactccactccactccaatccactctactccaagacattccattccattccattccgtcccattccattccacagcattccactaaactctactccaatccactccattccatttcattccattccattttattccatacctttctttcgacaggatctcactgtcaaacaggctggagtgcagtggcacaatctcagctcacatttcatttcaccattccattccattccattctactccatttccttccattccactccactccactccactacattcctttcattccactccactccactccactccattgcatcccatctcattccacaccattccagtccactccactccactccattctattagattatatcccatttcattacactccattccactccactgcactccactccactacactacactccactacactacgttccattccatnnnnnnnnnnnnnnnnnnnnnnnnnnnnnnnnnnnnnnnnnnnnnnnnnnnnnnnnnnnnnnnnnnnnnnnnnnnnnnnnnnnnnnnnnnnnnnnnnnnnnnnnnnnnnnnnnnnnnnnnnnnnnnnnnnnnnnnnnnnnnnnnnnnnnnnnnnnnnnnnnnnnnnnnnnnnnnnnnnnnnnnnnnnnnnnnnnnnnnnnnnnnnnnnnnnnnnnnnnnnnnnnnnnnnnnnnnnnnnnnnnnnnnnnnnnnnnnnnnnnnnnnnnnnnnnnnnnnnnnnnnnnnnnnnnnnnnnnnnnnnnnnnnnnnnnnnnnnnnnnnnnnnnnnnnnnnnnnnnnnnnnnnnnnnnnnnnnnnnnnnnnnnnnnnnnnnnnnnnnnnnnnnnnnnnnnnnnnnnnnnnnnnnnnnnnnnnnnnnnnnnnnnnnnnnnnnnnnnnnnnnnnnnnnnnnnnnnnnnnnnnnnnnnnnnnnnnnnnnnnnnnnnnnnnnnnnnnnnnnnnnnnnnnnnnnnnnnnnnnnnnnnnnnnnnnnnnnnnnnnnnnnnnnnnnnnnnnnnnnnnnnnnnnnnnnnnnnnnnnnnnnnnnnnnnnnnnnnnnnnnnnnnnnnnnnnnnnnnnnnnnnnnnnnnnnnnnnnnnnnnnnnnnnnnnnnnnnnnnnnnnnnnnnnnnnnnnnnnnnnnnnnnnnnnnnnnnnnnnnnnnnnnnnnnnnnnnnnnnnnnnnnnnnnnnnnnnnnnnnnnnnnnnnnnnnnnnnnnnnnnnnnnnnnnnnnnnnnnnnnnnnnnnnnnnnnnnnnnnnnnnnnnnnnnnnnnnnnnnnnnnnnnnnnnnnnnnnnnnnnnnnnnnnnnnnnnnnnnnnnnnnnnnnnnnnnnnnnnnnnnnnnnnnnnnnnnnnnnnnnnnnnnnnnnnnnnnnnnnnnnnnnnnnnnnnnnnnnnnnnnnnnnnnnnnnnnnnnnnnnnnnnnnnnnnnnnnnnnnnnnnnnnnnnnnnnnnnnnnnnnnnnnnnnnnnnnnnnnnnnnnnnnnnnnnnnnnnnnnnnnnnnnnnnnnnnnnnnnnnnnnnnnnnnnnnnnnnnnnnnnnnnnnnnnnnnnnnnnnnnnnnnnnnnnnnnnnnnnnnnnnnnnnnnnnnnnnnnnnnnnnnnnnnnnnnnnnnnnnnnnnnnnnnnnnnnnnnnnnnnnnnnnnnnnnnnnnnnnnnnnnnnnnnnnnnnnnnnnnnnnnnnnnnnnnnnnnnnnnnnnnnnnnnnnnnnnnnnnnnnnnnnnnnnnnnnnnnnnnnnnnnnnnnnnnnnnnnnnnnnnnnnnnnnnnnnnnnnnnnnnnnnnnnnnnnnnnnnnnnnnnnnnnnnnnnnnnnnnnnnnnnnnnnnnnnnnnnnnnnnnnnnnnnnnnnnnnnnnnnnnnnnnnnnnnnnnnnnnnnnnnnnnnnnnnnnnnnnnnnnnnnnnnnnnnnnnnnnnnnnnnnnnnnnnnnnnnnnnnnnnnnnnnnnnnnnnnnnnnnnnnnnnnnnnnnnnnnnnnnnnnnnnnnnnnnnnnnnnnnnnnnnnnnnnnnnnnnnnnnnnnnnnnnnnnnnnnnnnnnnnnnnnnnnnnnnnnnnnnnnnnnnnnnnnnnnnnnnnnnnnnnnnnnnnnnnnnnnnnnnnnnnnnnnnnnnnnnnnnnnnnnnnnnnnnnnnnnnnnnnnnnnnnnnnnnnnnnnnnnnnnnnnnnnnnnnnnnnnnnnnnnnnnnnnnnnnnnnnnnnnnnnnnnnnnnnnnnnnnnnnnnnnnnnnnnnnnnnnnnnnnnnnnnnnnnnnnnnnnnnnnnnnnnnnnnnnnnnnnnnnnnnnnnnnnnnnnnnnnnnnnnnnnnnnnnnnnnnnnnnnnnnnnnnnnnnnnnnnnnnnnnnnnnnnnnnnnnnnnnnnnnnnnnnnnnnnnnnnnnnnnnnnnnnnnnnnnnnnnnnnnnnnnnnnnnnnnnnnnnnnnnnnnnnnnnnnnnnnnnnnnnnnnnnnnnnnnnnnnnnnnnnnnnnnnnnnnnnnnnnnnnnnnnnnnnnnnnnnnnnnnnnnnnnnnnnnnnnnnnnnnnnnnnnnnnnnnnnnnnnnnnnnnnnnnnnnnnnnnnnnnnnnnnnnnnnnnnnnnnnnnnnnnnnnnnnnnnnnnnnnnnnnnnnnnnnnnnnnnnnnnnnnnnnnnnnnnnnnnnnnnnnnnnnnnnnnnnnnnnnnnnnnnnnnnnnnnnnnnnnnnnnnnnnnnnnnnnnnnnnnnnnnnnnnnnnnnnnnnnnnnnnnnnnnnnnnnnnnnnnnnnnnnnnnnnnnnnnnnnnnnnnnnnnnnnnnnnnnnnnnnnnnnnnnnnnnnnnnnnnnnnnnnnnnnnnnnnnnnnnnnnnnnnnnnnnnnnnnnnnnnnnnnnnnnnnnnnnnnnnnnnnnnnnnnnnnnnnnnnnnnnnnnnnnnnnnnnnnnnnnnnnnnnnnnnnnnnnnnnnnnnnnnnnnnnnnnnnnnnnnnnnnnnnnnnnnnnnnnnnnnnnnnnnnnnnnnnnnnnnnnnnnnnnnnnnnnnnnnnnnnnnnnnnnnnnnnnnnnnnnnnnnnnnnnnnnnnnnnnnnnnnnnnnnnnnnnnnnnnnnnnnnnnnnnnnnnnnnnnnnnnnnnnnnnnnnnnnnnnnnnnnnnnnnnnnnnnnnnnnnnnnnnnnnnnnnnnnnnnnnnnnnnnnnnnnnnnnnnnnnnnnnnnnnnnnnnnnnnnnnnnnnnnnnnnnnnnnnnnnnnnnnnnnnnnnnnnnnnnnnnnnnnnnnnnnnnnnnnnnnnnnnnnnnnnnnnnnnnnnnnnnnnnnnnnnnnnnnnnnnnnnnnnnnnnnnnnnnnnnnnnnnnnnnnnnnnnnnnnnnnnnnnnnnnnnnnnnnnnnnnnnnnnnnnnnnnnnnnnnnnnnnnnnnnnnnnnnnnnnnnnnnnnnnnnnnnnnnnnnnnnnnnnnnnnnnnnnnnnnnnnnnnnnnnnnnnnnnnnnnnnnnnnnnnnnnnnnnnnnnnnnnnnnnnnnnnnnnnnnnnnnnnnnnnnnnnnnnnnnnnnnnnnnnnnnnnnnnnnnnnnnnnnnnnnnnnnnnnnnnnnnnnnnnnnnnnnnnnnnnnnnnnnnnnnnnnnnnnnnnnnnnnnnnnnnnnnnnnnnnnnnnnnnnnnnnnnnnnnnnnnnnnnnnnnnnnnnnnnnnnnnnnnnnnnnnnnnnnnnnnnnnnnnnnnnnnnnnnnnnnnnnnnnnnnnnnnnnnnnnnnnnnnnnnnnnnnnnnnnnnnnnnnnnnnnnnnnnnnnnnnnnnnnnnnnnnnnnnnnnnnnnnnnnnnnnnnnnnnnnnnnnnnnnnnnnnnnnnnnnnnnnnnnnnnnnnnnnnnnnnnnnnnnnnnnnnnnnnnnnnnnnnnnnnnnnnnnnnnnnnnnnnnnnnnnnnnnnnnnnnnnnnnnnnnnnnnnnnnnnnnnnnnnnnnnnnnnnnnnnnnnnnnnnnnnnnnnnnnnnnnnnnnnnnnnnnnnnnnnnnnnnnnnnnnnnnnnnnnnnnnnnnnnnnnnnnnnnnnnnnnnnnnnnnnnnnnnnnnnnnnnnnnnnnnnnnnnnnnnnnnnnnnnnnnnnnnnnnnnnnnnnnnnnnnnnnnnnnnnnnnnnnnnnnnnnnnnnnnnnnnnnnnnnnnnnnnnnnnnnnnnnnnnnnnnnnnnnnnnnnnnnnnnnnnnnnnnnnnnnnnnnnnnnnnnnnnnnnnnnnnnnnnnnnnnnnnnnnnnnnnnnnnnnnnnnnnnnnnnnnnnnnnnnnnnnnnnnnnnnnnnnnnnnnnnnnnnnnnnnnnnnnnnnnnnnnnnnnnnnnnnnnnnnnnnnnnnnnnnnnnnnnnnnnnnnnnnnnnnnnnnnnnnnnnnnnnnnnnnnnnnnnnnnnnnnnnnnnnnnnnnnnnnnnnnnnnnnnnnnnnnnnnnnnnnnnnnnnnnnnnnnnnnnnnnnnnnnnnnnnnnnnnnnnnnnnnnnnnnnnnnnnnnnnnnnnnnnnnnnnnnnnnnnnnnnnnnnnnnnnnnnnnnnnnnnnnnnnnnnnnnnnnnnnnnnnnnnnnnnnnnnnnnnnnnnnnnnnnnnnnnnnnnnnnnnnnnnnnnnnnnnnnnnnnnnnnnnnnnnnnnnnnnnnnnnnnnnnnnnnnnnnnnnnnnnnnnnnnnnnnnnnnnnnnnnnnnnnnnnnnnnnnnnnnnnnnnnnnnnnnnnnnnnnnnnnnnnnnnnnnnnnnnnnnnnnnnnnnnnnnnnnnnnnnnnnnnnnnnnnnnnnnnnnnnnnnnnnnnnnnnnnnnnnnnnnnnnnnnnnnnnnnnnnnnnnnnnnnnnnnnnnnnnnnnnnnnnnnnnnnnnnnnnnnnnnnnnnnnnnnnnnnnnnnnnnnnnnnnnnnnnnnnnnnnnnnnnnnnnnnnnnnnnnnnnnnnnnnnnnnnnnnnnnnnnnnnnnnnnnnnnnnnnnnnnnnnnnnnnnnnnnnnnnnnnnnnnnnnnnnnnnnnnnnnnnnnnnnnnnnnnnnnnnnnnnnnnnnnnnnnnnnnnnnnnnnnnnnnnnnnnnnnnnnnnnnnnnnnnnnnnnnnnnnnnnnnnnnnnnnnnnnnnnnnnnnnnnnnnnnnnnnnnnnnnnnnnnnnnnnnnnnnnnnnnnnnnnnnnnnnnnnnnnnnnnnnnnnnnnnnnnnnnnnnnnnnnnnnnnnnnnnnnnnnnnnnnnnnnnnnnnnnnnnnnnnnnnnnnnnnnnnnnnnnnnnnnnnnnnnnnnnnnnnnnnnnnnnnnnnnnnnnnnnnnnnnnnnnnnnnnnnnnnnnnnnnnnnnnnnnnnnnnnnnnnnnnnnnnnnnnnnnnnnnnnnnnnnnnnnnnnnnnnnnnnnnnnnnnnnnnnnnnnnnnnnnnnnnnnnnnnnnnnnnnnnnnnnnnnnnnnnnnnnnnnnnnnnnnnnnnnnnnnnnnnnnnnnnnnnnnnnnnnnnnnnnnnnnnnnnnnnnnnnnnnnnnnnnnnnnnnnnnnnnnnnnnnnnnnnnnnnnnnnnnnnnnnnnnnnnnnnnnnnnnnnnnnnnnnnnnnnnnnnnnnnnnnnnnnnnnnnnnnnnnnnnnnnnnnnnnnnnnnnnnnnnnnnnnnnnnnnnnnnnnnnnnnnnnnnnnnnnnnnnnnnnnnnnnnnnnnnnnnnnnnnnnnnnnnnnnnnnnnnnnnnnnnnnnnnnnnnnnnnnnnnnnnnnnnnnnnnnnnnnnnnnnnnnnnnnnnnnnnnnnnnnnnnnnnnnnnnnnnnnnnnnnnnnnnnnnnnnnnnnnnnnnnnnnnnnnnnnnnnnnnnnnnnnnnnnnnnnnnnnnnnnnnnnnnnnnnnnnnnnnnnnnnnnnnnnnnnnnnnnnnnnnnnnnnnnnnnnnnnnnnnnnnnnnnnnnnnnnnnnnnnnnnnnnnnnnnnnnnnnnnnnnnnnnnnnnnnnnnnnnnnnnnnnnnnnnnnnnnnnnnnnnnnnnnnnnnnnnnnnnnnnnnnnnnnnnnnnnnnnnnnnnnnnnnnnnnnnnnnnnnnnnnnnnnnnnnnnnnnnnnnnnnnnnnnnnnnnnnnnnnnnnnnnnnnnnnnnnnnnnnnnnnnnnnnnnnnnnnnnnnnnnnnnnnnnnnnnnnnnnnnnnnnnnnnnnnnnnnnnnnnnnnnnnnnnnnnnnnnnnnnnnnnnnnnnnnnnnnnnnnnnnnnnnnnnnnnnnnnnnnnnnnnnnnnnnnnnnnnnnnnnnnnnnnnnnnnnnnnnnnnnnnnnnnnnnnnnnnnnnnnnnnnnnnnnnnnnnnnnnnnnnnnnnnnnnnnnnnnnnnnnnnnnnnnnnnnnnnnnnnnnnnnnnnnnnnnnnnnnnnnnnnnnnnnnnnnnnnnnnnnnnnnnnnnnnnnnnnnnnnnnnnnnnnnnnnnnnnnnnnnnnnnnnnnnnnnnnnnnnnnnnnnnnnnnnnnnnnnnnnnnnnnnnnnnnnnnnnnnnnnnnnnnnnnnnnnnnnnnnnnnnnnnnnnnnnnnnnnnnnnnnnnnnnnnnnnnnnnnnnnnnnnnnnnnnnngagtggatatttggagctcatttggtcctactgtggaaaaacaaatatcttcacataaaaactacacagaagctttatgagaaacttctttgtgatctgtgcattcatctcacagagtagaacctttcttttgattgagcacttttgaaacactcttttttttagaatctgcaagtggaagtttggagccttttgaggcctatagtggagaaggaaatatcttcacataaaaactatgcagaagcattctgagaaactactttgtgatgtgtgcattcatctcacagagtagaacctttcttttgattgagcacttttgaaacactctttttttagaatctgcaagtggatatttggtgccttttcaggcctatagtggagaaggaaatatcttcacagaaaaactatgcagaagcattctgagaaactactttgtgatgtgtgcattcacctcacagagtagaacctttctatggattgagcagttttgaaacacgctttttgtagaatctgcaagtggatatttcgtgctcattggtgcctactgtggaaaaacaaatgtcttcacataaaaactacacagaagcattctgagaaacttctttgtgatctgtgcattcacctcacagagtcgaatcttccttttgattcagcagttgtgaaacactatttttttagaatctgcaagtggatatttggagccttttgaggcctatagtggagaaggaaatatcttcacataaaaactatgcagaagcattctgagaaactactttgtgatgtgtgaattcatctcacagattagaaactttcttttgattgagcagttttgaaactctctttttttagaatctgcttgtggatattccattcctttccattccactcaacttcattccgttccattctactcaattccattcctttcccttccactccattccactacgctccattccactacactccattctcctccactccactgtattatcttccattccagttcattccatcccattctattccattccattccagttcattccattccattccactccattccattccattccactccattccattgcactccaatcctctccactcaactccagtccactcctctccgctccactccattcccttccgttccattgaattccattccattccattcccctccattccactccactcaattctactccattcgactccactccactccacaccactagactccattcgattccattccattccattcctttccattccattccatgccactccattccattccattcccctgcactccgatccactcctctcaactccactatactacactacactccattgcattccattgcattccgttttgtaccattccgttccattgcactcctttccattccactccactccattccattccactctactctattcctttccattcctttatttctactggatgtcactctgtcacccagactgtagtacagtggcacaatcttagctcacattacatttcaccattccattccattctattgctttccattccattcctttccattccactccactccaatccattccattccactccactctattccttgccattccattccattccattccactccactccgattcactccactcaactgtactccactccattccacttcatttcattccgttccattccattgcattgcattccattccattccattccactccactccattccattccactccactccattccattccactccactcctttccactccattccattccattctactacattccattccattccatttcattccattccattccactctattccactcccctcccctccagtccactccattccactctactccattccattccattccattccgttccattccattccattccactccactctgatcctctctactcaactccactccactgtacttctttccgttccgttctgtttcattccgttcttttcccttccattccattccgttccattccattccactccactccatgccattccactccattcctctccactccactccaatccactccattccactccattccattccattacattccactgcattccaatccactatactcaactccactgcactccactccattccactacattccactccattccactcttctccactccactccattccattccactccattccattcaattccattccataccattccactcctttcatctccactccactccaatccactccacttcactccactccaatccattccactccactccattctattccactccattctattccactccattccactccactctattccactccactccactccattccattccactccactcctttccattctactccattccattcctctccactccactccagtccaatccacatcactccactccactccattccgttccattccattccacttcactccattccatttccttccattccatcccattcgattccattccattccactgcactccaatcttcacatgaaaactaaacagaatctttctgagaaacttttttgtgatgtgtgcattcatctcacagagttgaaccattctattgattgagcattttggtcacagtctttttgtagaatctgcaaaaggatatttgtgagcgctttgaagcctatggtgaaaaaggaaatatcttcacagaaaaactagaaagaagttttctgagaaactgttttttgatgtgtgaattcatctcacagaattgagcctttctattgattgagtgtattggaaaccatctttttgtagaatctgcaaaggattatttgtgaacacttgggggccaatggtggaaaaggaaatatcttcacatgaaaactagacggaagctttctgggacacttctgtgttatgtgtgcactcatctgaatcatttgaaccattctattgattgagcagtttggaaacagtctttttgtagaatcaacagaggatatttgtgagcactttgaggcctatggggaaaaagtaaatatcttcacataaaaactagacagaaggtttctgagaaactgctttgtaatgtgtgcattcatctcacagaggtaaacatttcttttcattgagcagatgggaaactcttttcttgtagaatctgcaaagggatatttgtgagtgctttgactcctatggtgaaaagggaaatatcttcatataaaatgtagacagaaactttctgagaaacttatttgtgatgtgtgcattcatctcatagagttgaaccattcttattttttttggagctctcagtttaattatttatttatttacttttattattattatactttatgttttagggaacatgtgtacaacgtgtaggtttgttacatatgtattcatgtgtcatgtttgtgtgcattaggtgtatctcctaaggctatccctccccctccccacactggactacactccctggtttgtggtgtgtgatggttctctttctgtgtccatgtgttctctttgatcaattcccagctatgagtgagatcatgtggtgttttatttttttgtccttgcgatagttcgctgagaatgatggtttccagcttcatccatgtccctacaaaggacatgaactcatcattttttatggccgcatagtgttccatgatggatatgtgccacgttttattcattcagtctttcgttgttggacatttacattggttccaagtctttgctattgtgaatagtgccgctataaacatacgtgtgcatgtgtctttatagcagcatgatttataatcctttgggtatatacccagtaatgggatggctaggtcaaatggtatttctagttctagatccctgaggaatcaccataccaacttccacaatggttgaactagtttacactccaactgacagtgcaaaagtgttcctatttctcacatcctctccagcacctgttgtttcctgactttttaatgatcaccattctaactggtgtgaaatggtatctcattgtggttttgacttgcatttctctgatggccagtgaagatgagcattttttcatttgttcattggctgcataaatgtctttttttgagaaatgtcttctcatatacttcacacactttttgatgggtttgtttttttcctgtaaattagtctgagttcattgtagattcctgatattagccctttgtcagatgagtaggttgcaaaaatattctcccattctgtaagattcctgttcactctgatggtggtttcttttgctgtgcagaagctccttagtttaattagatcccatttgtcaattgtggcttttgttgccattgctttaggtgttttagacatgaagtccttgcccatgcctatgtcctgaatggtcttgcctaggatttcttctagagattttatgtgaagcattcttttgattaatcagtttggatactctgttcttgtagaatctgcaaggagatatttgtgagcgctttgaggcctttggtgaaaaaggaaataccttcacataataaatagacagaagttctctgagaaacctccctgtcatgtgtgcattcatctcacatagttgaaacagtcttttgactgaacagtttgaaaactgtcaatttgtagaatctgcaaagggatatttatgagcactttgaggcctatggtgagaaaggaaatatcttcacataaacactagacagatttctgagaaacctctttgtgatgtgtgcattcatctcacagagttgaaccattcttttgattgagaagtttttaaaaagactttttgtagaatctgcaaagggatatttttcagctctatgaggcctatggtgaaaaaggaaatatcttcaataaaaactataaagaatgtttctgagaagctgttttgcaaggtgtgcactcatctcagagagaaaaaagtttctattctttgatgagtctggaaactctgttcttgcaaaatctgcaaagggatatttgcgagtggcttgaggcctatggtgaaaaaggaaatatcttcacataaaaactacacagaaggtttcagagaaacttctttgtgatatgtgcattcatctcacaaagttgaaccattcttttgattgagaagtttggaaacagtcttttcagagaatttgcaaagggatattttgagcgctttgataggtatggtgaaaagggaaatatcttcacataaaaagtggacagaagctttcagagaaacttctttgcgatgtgtgcattcatctcacagagttgaacttttctttttatttagcaatttgaaaagagttcttttctagaatctgcagagggatatttgtgagccctttatggcctaaggtgaaataggaaatatcttcacataaaaactagacagaggcattctgagaaacttcttcatgaagtgtgctttcatcacacagagttgaacctctcttttgattgaggagtttgggaacagcatttttgtagaatatggatatggatatttggagcgctttgaggcctatggtgaaaaaagaaatatcttcacctgaaaactagacagaagcattctaagaaacttctttgtgatgtatgcattcatctcacagagtttaacctttcttctgattgagcagcttcaaaacagtccttttgtagaatctgcaaagggatatttgtgagcccattgaggcctatggtgaaataggaaatatcttcacataaaaactagtcagaagatttctgagaaacatctttgtgatatgtgctttcatctcacagagtagaacctttcttttgattgagcagtttggaaacacactttttgtagaatctgcaaatggatatttggagcagtttgagtactatggtgaaaaaggaaatatcttcacataaaaactagaaagcaacattctatgaatctactttgtgatgtgtgcttttatctcacagatttgaatctttctattcattgagaagtttggaaaccatctttttgcagaatctgcaaatggatatttggagcggtgtgaggtctttgtgagaaaggaaacatcttcacataaaaactaggcagaagcattctgagaaacttcttggtgatgtgtgcatttatcacacagagttgaacccttctttttattgaacggtttggaaaatgtctttttgtagtatctgtagagggatgtttgcaagaatttgaggcctatggtgaacaaggaaatatcttcacataaaaactagacagaaggtttctgagaaacttctttgtgatgtgtgaattcatctcacagtgttgaacctttctttggattgagcagtttggaaacaatccttttgtagaatctgcaaaggtatatctctgagcccactgaggtctatggtgaaatatgatatatcttcccattaaaactagacagaaggtttctaagaaacttctttgtgatgtgtgcttccatctcacagagttgaacttttcttttgattgagcattttggaaacactctttttgtagaatctgcaaatggatatttggagcactttgaggcgtgtggtaaaaaaggaaatatcatcacataaaaattcgacagaagaattctgagaaacttctttttgaggcttgcattcttctcacacagctgaacatttctttgattgaatatttggaaacagtctttttgtaaaatctacaaagggataattgtgaaccctttgaggcctatgatgaactaggaaatatcttcacataaaaactacacagaaactttctgagaaacttttttctgatgtgttcattcatctcacagatttgaacctttcttttgctagagcagtttggaaacattcctattgtagaatcgccaaaggggtatttctcagccgattgaggcctttggtgatataggaaatatcttcacataaaagctagacagaagctttctgagaaacttatttttaatgagtggtttcatctcaaagaggtaagcatttcttttgactgagcagtttggaaacacgctttttgcataatctgcaaatggataattggagagttttgaggcctatggtggaaaagcaaatatcttcacataaaaactaaacagaagctttctgagaaactactttgtaatgcgtgcattcatctcacagcgttgaaaccttgttttgattgagcagtttgtaaacagactttttgtagaatctgcaaatggatatttggagtgctttgaggcctatggtgaaaaaggaaatatcttcacaaaaaaactagaaataaacattctgagaaacttctttgtgatatgtgctttcatctcacagagttgaacctttcttttcattgagcagtttcgaaacagactttttatagaatctggaaatgcatatttggagagctttgaggcctatggtgaaaaaggaaatatcttcagataaacactaaacagaagctttctgagaaacttctttgtgatgcgtgcattcatatcacagagctgaaactttcttttgatttagcagtttgtaaacagtcttttggtagaatctgcaaatggatacttggagtgctttgaggcctatggtgaaaaagaaaatatcttcacaaaaaaactagaaagatacattctgagaaacttctttctgatgtgagctttcagctcacagagttgaaactctcttttcattgagcaatttggaaacagtctttatgtggaatctgcaaatggatatttggagcgctttgaagcctatggtgaaaaaggaaatatctcacataaaccctagacagaagtattctgagaaacttctttgtcttgtgtccattcatctcacagagtcgaacctttctttggattgagcagtttggaaacagtctttttgtagaatctgcgaaaaatatatttgagccctttatggcccatggtgaaacaggaaatatcctcacagaaaaactagacagaatccttctgagaaacgtctttgtgatgtgtgctttcaacacacggagttgtagctttcttttgattgagcagtttagaaacagtctttttgcggaatcagcaaatggatgtttggagcgctttgaggcctatggcgaaaaaggaaataccttcacataaaaaagagacagaagcattgtaagaaacatctctgtgatgtgtgcattcatctcatacagttgaatccttctttgattgaggattttggaaacagtctttctgtggaatcagcaaatggatattttgagcactttgaggcccatggtcaaaaaggaaataccttcatataaaaaatagaaggattgtgagaaacatccatgtgatgtgtacattcatcttatagagttgaacctttctttgattgagcagtttggaaacagtccttttgtagaatctgcaaagggatatttctgagcccattgaagcctagggtgaaaaagaaatatcttcacataaaaactagatagaagcattctgataaacttttttgtggtgtgtccattcatctcacagagttgaaattttctttggattgagcagtttggaaacagtctttttgtagaatttgcaaaaaatatttgtgagccctatatggcccatggtccttgtcacaggattgaacctttctttttgatagagcagattggaaacactctttttgtagaatctacaaatgagtatttggagcgctttgaggcctatggtgaaaaaagaaatatcttcacataaaaactagacagatgcattctgcaaaacttctatgtgatgtgtgcattcatctcacagggttgaatcattctttggattcagcagttttctaaacagtccttttgtagaatctgcaaagggatatttctgagcccactgagtcctatggtgaaaaaggaaatatcttcaaataaaagcaaaacagaagctttctgagaaccttctttgtgatgtgtgcattcgtctctcagcgttgaaactttcttttgattgagcaggttagaaacagtctttttgtaagatctgcaaagggatatttctgagccgtttgtggctgacggtgaaaaataaatatcttcacataaaaactagacagaagcattctgagaaatctctttctgatgtgtgcattcatctcacagagttgaatctttcttttgtttgaacagtttggaaacagtcttttttctgaatatgcaaattgatatttgtgagccctttacagcctaaggtgaaataggaaataccttcacataaaaactagacagaatctgagaaaatgctttgtgatgtgtgctttaatttcacagaggagaaattttcttttgattgagcagtttggaaacagcctttttgtagaatccgcaaatggatatttgcggcacttttaggcctatggagaaaaaggaaatatcttcaccaaaacactaaaaagaagctttctgagaaacttatttgtgatgcgtggactcatatcacagatctgatccttttgattgagcagattggaaaccatccttttgtacaatctgcaaagggatatttttgagccatttgatgcctatggtgaaaaagaattatcttcacataaaaagtagacagaatcattctgagaaactcctgtgtgatgtgtgcattcatctcacagagttgaacctttcttttcttggagcagtttggaaacagtctttttgtagtatctgcagagggatatttgtgagcactttaaggcctatggtgaaaaaggaaatatcttcacattaaactagacagaagcattctgagaaacttattttttaagtgtggattcatctcacagagatgaatctttcttttcattgagcagtttggaaagagtatttttatacaaagtgcaaagggatatttctgagtgctttgaggcctatagtgaaaaagtaatatcttcacatataaactagacagaagcattctgagaaacttctttttttatgtgtgcattcacctcacagagttgaaactttcttttcattgagcagttcggaaacactctttttgtagaatctgcaaagggatatttatgattcctttgaggcctgtggtgaaataggaaatatactgacacaaaaactagacagaagctttctgagaaacttctttgtgatgtgtgctttcacctcacagagttgaacctttcttttgattgagcagtttggaaacagtctttttgtggaatttgcaaatggatgttttgcgtggtttgaggcctatggtgaaaaagtaaatatcttcacattaaaactagacagaagcattctgagaaacttctttgtgacgtgtacattcatctcacgttgttgagactatcttttgattgagcagattggaaacagtccttttgttgtatctgcagagggatatttgtgagtggtttgaggtctgtggtgaaaaagggaataccttcacataaaaactagacagaagcattgtgggaaacttctctgtgatgtgtgcattcaactcaccgaggcaaaactttctttagattgagcagtttggaaaccgtccttttttagaatctgcaaagggatatttctgagcccattgaggcctacggtggaaaagaaatatcttcacataaaaactggacagatgcattctgagaaacttctttgtgatgtgtccattcatctcacagagttgaacctttctttggattgagcagtttggacacagtctttttgtagaatctgtaaaaaatatttgtgatccctttacagcctatgttgaaaaaggaaatatcttcacataaaaactagccaggagctttctgagaaactactttgtgatgtgtgctttcttctcacagagttgaacctatcgtttgaatgagcagtttggaaatgctctttttgtagagtctgtaaatgcatatttggagcattttgaggcctatggtgagaaaggaaatatcttcacatataaaccagacagaagcattctgagaaacttctttgtgatatgtgtattcatctcaaagagttgaacatttctttggatgcagcagtttggaaacagtctttttgtagtatctgcagagggatattcatgagcagtttaaggcctatggttgaaaaggatatatcttcacagaaaaccttgacagatccattgtgagaagcttctttgagatgtgtgcattcatctcacagagttgaacctttctttggattgagcagttttctaaacagaccttttgcagaatctacaaagggatacttctgagcccattgaggcctatggtgaaaaaggatatatcttcacatgaaatcttaacagaagctttctgagaaacttctttggatgtgtgcattcacctcacaatgttgaaactttcttttgattgagcagttttgaaacagtctttttgaacaatctgcaaagggatatttctgagccatttgaggcccatcgagagagaaatatcttcatataaaaactagacaaaagtattgtgagaaacttctttgtaatgtgtgcattcatcacacatagttgaaattttcttctgattgagcagtttggagacagtctttttgtataatatgcaaaaggatatttgtgagccctttcaggcctatggtgaaatagagaatatcttcacaaaaaaactagacagaagctttctgagaaacttttttgtgatgcgtgctttcatctaacagagttgaacttttcttttgattgagcagtttggaaacattctttttgtcaaatctgaagatggatatttgcagtgtttcaggcctatagtgaacaggaaatttcttcacataaaaactagacagaagtattctgagaaacttctttgtgatgtgtgcattcatgtcaaagagttgaaactttccttggattgagcagtttggaaagagtccttttgtagaatctgcaaagggatgtttgtgaacacatagggggcctatggtgaaataggaaatgtcttcatataaaaactagacagaagctttctgtaaaacttatttgtgttgtgtgctttcaactcacagagttgaacatctcttttgactgagcagtttggaaacactcttttagtggaacttgcaaatggatatttggagtgctttgaggcctatggtgaaaaagaaaatatctgcttataaaaactagacagaaactttctgagaaacttctttgtgatgtgtactttcatctcacagatttagactttgcttttcattgagcagtttggcaacaagtcattttgtagaatctgaaaagggatatttgtgagtggtttgaggcctatggtgaaaaagtaaatatcttcacctaaaacctagacagaagcattttgagaaaactctttgtgatgtttgcattcatctcactgagttgaacctttctgttcattgagcagtgtggaaacatactttttgtgcaatctgtaaaggaatattggtttgcagtttgagacctatggtgaaaaagtaatatcttcacataaaaactagacagaagcattctgagaaactaattttttatgtgtgcattgatctcacagagttgaacctttcttttgatgaagcagttcggaaacagttttttgtaaaatctgaatagggatatttgtgatccctttgaggccaaaggtgaaataggaaatatcttcacataaaaacaagatagaaactttctgagaaacttctttgtgacgtgggctttcatctcacagatttgaacctttattttgattgagcagtttggaaagagtctttttgtagaatctgcaaatgtatatttggagcgttttaaggcctagagtgaaaaaggaaatatcttcacataaaaacaacacagtagctttttgagaaatctctttgtgacatttccattcatctctaagagttgaccatttcttttcattgagcagtttggaaacagtctttttgtacaaaatgcaaagggatatttctgagcagtttgaggtcaatggtgaaaaataaatatcttcacatgaaaactagacagaagcattttgagaaacttctttgtgaagtgtgcattcttctcacagagttgaacctttcttttgatttggcaatttggagagagtctcttggtagtataagtggagttatatttgtgagcgatttaaggcctatggtgcaaaaggaaattccttcacataaaaagtagacagaagctttctgagaaactttgtgatgtgtgtttttgtctcacagatttgagcctttcttttgattgaacagtttggaaacattctttttgtagaatctgcaaatggatatttggagcaatgtgagacctatggtgaaaaagaaaatatcttcacataaaaactagacagaagaattctgagaaacttctttgtgatgagtgcattcatctcatatagttgaaacattctatatggaccagtttggaaacagtctttttgtagtatctgcagagggatatttttgagtggtttaaagactatggtgaaaaggaaatatcttcacataataaccagacagaagcattccgagaaacttctttgtgatgtgtgcattcatctcacaatgttgaacgtttcttttgattgagcagtttggaaacagaacttttgtagaatctgcaaagggatatttgtgagcccattgattcctatggcaaaataggaattatcttgagataaaaactagacagaagatttctgagaaacttctttgtgatgtgtgctttcatctcacagagttgaaaatttcttttgattgagcagtttggaaacagtctttttgtataatctgcaaatggatatttggagcactttgtggcctaaggtgaaaatggaaatatcttcacataaaaactagacagaagaagtctgagaaaattctttgtgatgtgtgcattcacctcagagaggtgaacttttcttttgatggagcagtttggaaacagtctttttatagtatctgcagaaggatatttgtgagcagtttaaggcctgtggtgaaaaaggaaatatcttcacataaaaactagacagaagctttctgagaaacttctttgtgatgtgcgcattcatctcacagtgttgaaactttattttgtttgagcagtttagaaacagtctttttctgcaatctgcaaaggtatatttctgagccatttgaggtctatggtgaaaaagaaatatcttcacattgaaactagacagaagcattctgaggaacttctttgtgatgtctccattcatctgacagagttgaaagtttcttttaattcagcactttggaaaccatatttttgtagaatctgcaaagggatatttttgagacatttgaagcctatagtgaaatagtaaatatcttcacataaaaactagacaggagaattctgagaaatttctttatgatgtgtgcattcacctcacagaatttaacctttcttttgattgagcagtatggaaatggtcgtcttttagaatctggaaagggatatttcttagccctttgaggtctatggtgaaactggaaatatcttcacatgaaaactagaccaaagctttctgagaaacttctttgagatgtatgctttcatctcacagagttaaaactttcttttgattgagcagtttggaaacactctttttgtgaaatctgtaaatggatattaggaggactttgaggccaatggtgacaaaggaaatatcttcatgtaaaaactaaacagaagttttctgagaaactactttttgatgtatccattaatctaacagagttgaaactttctttttattgagcagtttggatacagtatttttgtagaatttgcagaaaatatttgtgagccctgtattgcctatggtgaaataggaattttcttcacatataaactagacagaagcattctgaggaacttctgtgtgatgtgtgcattcatctcacatagttgaaactgtctttggattgagaagtttggaaacagttctcttgtagaatctgcaaagggatatttctgagcccattgattactatggtgcaatgtgaaatatcttcacataaaaactagacagaagctttctaagaatcttctttgtgatgtgtgctttcatctcacagaattgaaacttccttttgattgaggagtttggaaacactctttttctaaaatctgcaaatggatatttggagagcttttgaggcccatggtgaaaaacgaaatatcttcccataaaaactaaacagaagttttctgagaaacttccttgtgatgtgtgcattcatctcacagagttgaacctttcttttgagtgagcaggttggaaagagacttattgtacaatctgcaaagggataattctgatccgtttgaggcctatggtgaaagagaaatatcttcacataaaaactagacagaatcattctgagaaatttctttgtgatgtgtccattcatctcacagagttgaacctttcttttgattgagcaatttggaaacagtttttttttaaaaccttcaaagggatatttgtgagccttttatggcctcaggtgaaataggaagtatcttcacatacatactagagagaagctgtctgagtaacatttttgtgatgtgtgctttcatctcagagaggtaaaaatttgttttgattgatcagtttggaaacagtctttttgtagaatctgcaaatggatgtttggattgctttgaggcctatgttgagaaaggtaatatcttcacataaaaacaagacagaagatttctgagaaacttctctgttatgtgtgcattcatctcactggtttgaacctttcttttgattgagcagtttggaaacagtctttttgtacaatctacaaagggatatttctgaacggtttgatgcctatggtgaaaaagaaatatcttcacataaaaactagacagaagcattatgataaactaatttattatgtgtgcattcgtctcacagagttgaacctttcttttcacttagcagtttgaaaactgtctttttgtagagtctgcaaagggatatttgtgagactttgaggcctatggtgatataggaaatatcttcacaagaaaagtagacagaagaattatgagaaacttcttcatgatgtgtactttcttctcacagatttgagtctttcttttaattgaacagtttggaaactctctttttgtagagtttgcaaaaggatatttggattgctttgaggcctatggtgaaaaaggaaatattttcacctaaaaacttaacagaagctttctgaaaaacttctctgtgatgtgagtattcatgtcacagtgttgaacctttgttttcattgagcagtttggaaaccatctttttgtacaatctgcaaagggatattgctgagccatttgaggcctatagtgaaaaacaaatatcttaacacaaaaactggacagaggcattctgagaaacttcttattcatgtgtgcattcatctcccagtgttgaacctttcttttcattgagaaattcagaaacagtctttttgtagaatttggaaaaggatatatgtgaacccactgaggcccatggtgaaatgggaaatatcttcacaggaaaactagacagaagcattctgagaaacttctttgtgatgtttgcattcatctcacagagttgaaactttcttttgattgagcagtttggaaaaactctttttgaagtatctgcaaaaagatatttggagcactttgtggcttgtggtgaaaaactaaatatcttcacataaaatctagtgagaaactttctgaaaacttctttgtgatgtgtgctttcatctcacagagttgaaaatttcttttgattaagcagtttggaaacagtattttgtagaatgtgcaaatcgataattggattgctttgaggcttatcattagaagggaaatatcttcacgtaaaaactagacagaagatttctgagaaacttctttgtgatgtgtgctttcatctcacagagttgaactgttcttttgattgagcagttaggaaacagtctttatctacaatctgcaaaaggatatttctgaggggtttggggcctacggtgaaaaagaaatatcttcacataaaaactagacagaagcattctgagaaacttattttttaggtgtgaattcatctcacagagttgaaacttacttttcattgagcagttttgtaacagactttttgtagaatctgaaaaaggatatttgtgagtcctttgaggcctatggtgtaacaggaaataccttcacttaaaaactagacagaagcattctgagtaacttctttgtgatttgtgctttcatctcacagagttgaacctttcttttgattgagcagtttggaaaaactctttttgtgcaatctgcaaaagatatttggtgcactttgtggactatggtgaaaaaggaaatatcttcacataaaaactagaaagaaactttctgagaaacttctttgtgatgtgcactttctttttattttattttatttagggtacatgtgcacaatgtgcaagttagttacatatgtatacatgtgccacgctggtgtcctgcacccattaactcataatttagcattaggtatatcccctaatgctatccctccccactccccccaccccacaacagtccccagagtgtgatgttccccttcctgtgtccatgtgttctcattgttcaaatctcacctatgagtgagaacatgtggtgtttggttttttgtccctgtgatagttgactgagaatgatgatttccaatttcatccatgtcctacaaaggacatgaactcatcattttttatggctccatagtattccatagtgtatatgtgccacattctcttaatccagtctatcattgttggacatttgggttggttccaagtctttgctattgtgaatagtgccgcaataaacatacatgtgcatgtgtccttatagcagcatgaaaccaacgagaacaaacacacaacataccagaatctctgggacacattcaaagcagtgtttagagggaaatttatagcactaaatgcccacaagagaaagcaagaaagatccaaaacttacaccctaacatcacaattaaaagaactagaaaagcaagagcaaacacattcaaaagctagcagaaggcaagaaataactgaaatcagagcagaactgaaagaaataaagacacaaaaatcccttccaaaaattaatgaatccaggagctggttttttgaaaggatcaacaaaattgatagaccactagcaagactaataaagaagaaaaaagagaagaatcaaatagatgcaataaaaaatgataagggggatatgaccaccgatcccacagaaattcatactaccatcagagaatactacaaacacctctatgcaaataaactagaaaatctagaagaaacggataaattctttgacatatacaccctctcaagactaaaccaggaagaagttgaatttctgaatagaccaataataggctctgaaattgtggcaataatcaatagcttaccaaccaaaaagagtccaggatcagatggattcacagccgaattctaccagaggtaaaaggaggaactgataccattccttctgaaactattccaatcaatagaaaaagagggaatcctccttaactcattttatgaagccagcaccatcctgatacctaagccgggcagagacacaaccaaaatagagaattttagaccaatatccttgatgaacattgatgctaaaatcctcaataaaatactggctaaccgaatccagcagcacatcaaaaagcttatccaccatgagcaagtgggcttcatccctgggatgcaaggctggttcaatatacgcaaatcaataaatgtaatccagcatataaacagaaccaaagacaaaaaccacatgattatctcaatagatgcagaaaaggcctttacaaaattcaacaacccttcatgctaaaaactctcaataaattaggtattgatgggatgtatctcaaaataataacagctatctgtgaaacttctttgtgatgtgtgcattcatctcacagagttgaacctttcttttgattgggcagtttggaaacagtctttttgtagaatctgcaaagtgatatgtttcagtggtttgaatccaatggtgaaaaaggaaatatcgaaaaataaaatgtagacagcagctttctgaagaacttctttgtgatgtgtgcattcatctcacagggttgaaacttcctttgattgatctgtttggaaacagacttttcatagaacctgcaaagtgatatttttgaacgctttgaggcttatggtgaaaaaggaaatatcttcacataaaaactaaactcatgttttctgggaaacttatttgtgatgggggtatgcatctcaaagacttgaatctttcttttgattgagcagtttggaaacagtctttttggagaatctgcaaagggatgtttttgagtggtttgaggcatgtgatgaaaaaggaaatatcttcatataaaaactagacagaagcattctgagaaaccactttgcgatgcatgcattcatctcacagagttgaattttctttcattgagcagattggaaacagtctttttgtagaatatgaaaagtgatatttgtgagctttctgaggcctattgtgaaaaaggaaatattcacaagtaaaatctagacagaagccttctgagaaactactttgtgatgtgtgcattcatcacacagagttgaagctttcttttccttgaccagtttggatagagtctttttgtagaatctgctttgcgatatttgtgagccctttgaagcctatggtgaaaaaagtaatatcttcacacaaaaacgagacagaagctttctgagaaacttcgttgtgatgtgtgcattcatcccaaaagttgaacctgtctttggattgagcagtttggaaacagtcctttgtagaatgtacaaagagatatttgggatccctttttggtctatggtgaaaaaggaaatgtcttcagataaaaactagacagaagcattctgagaaacttatttttgatgtgtgcattcttctcacagagttaaacctttctttagatagagcaggttggaaaatgtctttttgtagaatctgcaaagtgataatttgaatgctttgagacttatggtgaaaaaggaaatatcttcacataaaaactggatggaagctttctgagaaacttctttgtgatgtgtgcattcatctcaaagagttgaagctttgtttcagttgagcagtttggtaacagtctttttgtaaaatctgtaaagggacattagtgagcactttgaggcctatattgaaaaaggaaacatcttcaaataaaaactagacagaagctttcttagaaacttctttgtgatgtgtgcattcacctcacagagttgaagctttcttttgattgagtagtttggaaacagtctttttgtagaatcttcaaagagttattcatgagcagtttgaggcctatggtgaaaaagggagtatcaacaaataaaaactagacagaaacttcctgagaaacttctctgtgatgtgtgtattcatctggcagagtggaagctttctttgagcagtttggagacagtatttttgtagaatctgcaaagggatatatgtaggcggtttgaggtctatggtgaaaacggaaatatcttcacataaaaactaactgctcaatgggaagaaatttttacttctttgtgataaatgcacatgtcacaaaggagtttctcagaaaacttctttctacttttaatgtgaagatatttcctttttctccatacgcctcaatgcgctcgcagatagccctttgcagattctacaaaaagactgtttccaaactgctcaataaacagaatgattcaaccctgtgagacgaatgtgcacatcacaaagaagtttctcagaaaacttccttctcagttttatgtgaagatatttcttttttgaacatagacctcaatgcacttccaaatatacctttgcagaatctacaaaaagactgtttccaaactgctcaatcaaaagaaagtttcaactctgttagatgaatgcacacatcagaaagtagtttctcaacaagcctctcactagtttttatgtgaagatagttcctttttcaacgtgggtctcaaagcactcaaaaatatccctttgcagactctagaataacagagtttacaaactgctcaatgaaaggaatgtttacctctgtgagatgagtacacatatcttaaagcagtttctcagaatgcttctttctagtttttatgtgaagatatttccttttccaccgtaggcctcaacttgcttctaaatatccctttgcagattgtacaaaaagactgtttccagactgctcaatcaaaacaaatgttaaactctatgagataaatgcactcatcacaaaaagtttctcagaaaacttttgtctagtttttatgtgaagatatttccttattcaccataggcctcaaagcgctacaaatatccctctgcagattctacaaaaagactgtttgcaaactgctcaatccaaagaatgtttcaactctgtgtggtgaatgcacacatccaaagaattttctcagaaactttctttatggtttttctgtgaagatatttcctttttcaacataggcctcaaagccttcacaaataaccctttgcagattctacaaaaagactgttttcaaaccgctcaataaaaagaattattgaacactgtcagatgaatgcacacagctcaaagaagtttctcagaatccttcagtctagtttttatgtgaatatatttcctttttcacgatagacctcaaagtgctccaaatatccgtttgcagagtctacaaaaagactgtttccaaatggctcaatcaaaacaaaggttcaactctgtgtgatgaatgcacacatcaagaagcagtttctcagaatgcttctgtctagtttttcaccataggcctggaagtgctcacaaatatccctttacagattctacaaatgtacttcttccaaattgctcagtcaaaagaaaggttcaactctgtgagatgtatgcacaccacaaagaggtttctcagaaagcttctttctagtttttatgtgaagatatttcctttttcaccattggcctcaaagcattcacaaatatccctttgcagattttacaaaaagactctttacacgttgctcaatcaaaagaatgtttcaactttgtgaggtgaatgctcacatcaccaggatgtttctcagaaagcttttgtgtagtttttatgtgaagatatgtcttttttcaccatacacctcaaagggctcacaaatatccctttgcagatcttacaagaaaagagtttccaagcttctcaatgaaaagaaacagacacatctgggagatgactgcacatatcacaaagcggtttctgagaaacattctgtctagtttttctgtgaaggtatctccttttccaccacaggatgcaaagcactcaaaattgtccttttgcagattctacaaaaagattgtttccacactgctcatcaaaagaaaggttcaactctgtgagatgattgcacacgtcaaaaagtagtttctcagaaagcttctattaagttttcatgtgaatgtttactttttccccatgagcctcaaggtgctcacaagtatccacttgaagaatatttaaaaatactgtttccaaactgctcaatcaaaagaaaggttgaactgagtaagatgaatgcacatatcacaaagaagtttctcagaaaccttctttatagtttttatgtgaagatatttcctttttcaacacaggcctcaaattgctcagcaatatccctttgtagactctgcaaaaagactgcttcccaactgcttaatcaaataaatggttgaactctgtgagatggatgtacacatctcaaagatgtttctcagaaatcttctgtccattttttatgtgaagatatttcctttttcaccatagcactccaagtcgtgacaaatatcccttgcagcttctacaaaaagactgtttccagactgctcaatcaaaagaatggttcaactctgtgagatgattgcacacatcacaaagaagccactaacaaggcttctgtctagtttgtatgtgaagatatttcctttttcatcataggcctcaaagcactcacaaatatccctttgcagattctacaagaacagagtttccagactgatcatagaaaataaacgtttacctctctgagatcaatgcacacaccacaaagctgtttctaagaaatcttccttatgccttttatataaatatatttcctttttcaccattggcctcaaagctctcataaatgtccctttgcagattccacaaacagatggtttccatattgatcaatcaaaagtaagtttcaactttgtgagatgaatgcccacatcacaaagaggtttctcagaaaacctctctctaatttttatgtgaagatatttcctttttcaccataggcctcaaagcactcacaaatatccctttgcagaatctacaagtacagtttccagacagatcagagaaaagaaacgtttacctctgtgagatgaatgcatacatcacaaagctgtttctgagaaaccttgcttatactttttatgtgaatacatttcctttttcaccatagacctcaaagcactcacaaatatccctttgcagactctacaaaaagagtgtttacaaactgttcaatcaaaagaatggttgaactctacgagatgaatgcacacatcacaaagaagtttctcggaaagcttctgtctagtttttatgtgaagatatttcttatttcatcataggcctcacaccactcaaaaatatgactttacagattctacaaaaatactgtttccaaattgctcaatccaaagaaagtttcaaatctgtgagatgaatgcacacatcacaaggaggtttctcagaaagcttctctctagtgaaaatatttcattttcactatacgcttcaaagcatcacaaatatccctttgcagattctaccaaaatactgtttacaaactgcccaatcaaaagaatgtttcaactctgtgagtcgaattctcacatctccaagatgtttcacagaaagcttctgtctagtttttatgtgaagataattcctttttcaccataggcctcaaagtgctgacaaatatccctttgcagattttacaggaacagaatttccaatctgttcaatgaaaagaaatggttacctctgtgagatgaaagcacacaccacaaccctttggaaattctaccaaatactgcttccaaaatgctcatcaaaagaaaggttcacctctgtgggatgaatgcacatatcaaaaatatgattctcagaaagcttctatctcgtttttatgtgaaagtgtttcctttttcaccatgggcctcaaagtgctcaaaaatatccctttgcagatcctaaaaaaagactgtttccaaaccgctgagtcaaaggagtggttcaactctgtgagatgaatgcacacatcataaagaagtttctcacaaactttctttatagtttttatgtgaacatatttccttttaaccatagacctcaaagtgctcacaaatatccctttgcagattctacaaaaagacggtttcccaactgctcaatcaaaagaattgttgaactctgtgagatgaatacatacatcacaaagcagtttctcagaaaactttagtctagtttttacttgaagatactttctctttcaccataggcctcaaagtgctcagaaatttccccttacagattccacaaaaagacgttttcaaactgcttaatcaaaagaaagtttcaattctgtgagatgaatgcacacatcaccaagaagtttctcagtaggcgatactttctctttcactatagtcctcaaagtgatcagaaatatccctttacagattccacaaaagacgtttctaaactgcttaatcaaaagaaagttacaattctgtgagatgaatgcacacatcaccaagaagtttctcagtaggcctctgtctagtttttatgtgaagacaatatctttttcaccatagggttctaggcactcaaaaatgtcccttagcagatcctacaagaacagagtttcccaactgatcaaagaaaagaattgttttcctctgcgagatgaatgcagacatcaaaaaacagtttctcagaaaccttctttatatttttctttgaagatacttcttttcctgcataggcctcaaagtgctcacaactatccgtttgcagactcttcaaaaagactgtttccaaatggctgaattaaaagagacgttcaaatctgtgagatgaatgcacatatcacaaagaagtatcttagaaacgttctttatactttgaatgtgaagatatttcctttgtcacaataggcctcaaagtgctcaaaaatacctcctttgagattgtacaagaacagagtttccagactgatctcagaaaagaaacacttacctatgtgagatgaatgtacacatcacaatgttgtttttagaaaacctgctttatagttcttatgtgaaaatatgacgttttccaccataggattcacagcactccaaataaccaatggcagtctctacaaaaagagtgtttccaaactgctcaacaaaaagaaagtccaactctgtgagatgaatgcacacaacacaaagaagtttctcagaatgcttctgtctagttttcatgtgaagatatttccttttccaccataggcgtcaaagcgctctaaatatccacttgcagattttacaaaaagagtgtttcaaaactgctcaaccaaaagaaaggttccactctgcgagatgaaagcacacatcacaaagaagtttctcaaaatgattccctatagtttttatgtgaagatatttccttttccacaagaggctgcaaagcgatccaaatatgcaattgcagattctacaaaaagtgtgtttcagaactgcttaatcaaaataaaggttcaactctgtgagttgaatacacacatcacaaagaagtttctcagaatgcttctcgctagtttttatgggaagatttattcttttccaccgtatgcctcaaagtgatccaaatatccacttgcagattctacaaaaagagtctttcaaaactgcttaattaaaagaatggttcaactctgtgagatgaatgcacacatcacaaagaagtttctccgaatgcttctgtctagtttttatgtgcagatatttccttttccactataggcctcaaagctgtccaaatacaaatttgaagacggtacgaaaagaatgtatcctaactgctcaatataaagacatgttcaactcggtgagttgaatgcacacatcacaaaaaagtttctcagtatgcttctgtctagtttttatttgaagatatttccttttccaccataggcctcaaagcgctctaaatatccaactgctgattctacaaaaagagtgtttcaaaactgctcaatcaaaagaaatgttcacctctgtgagttaaatgtgcacatcacaaagaagtatcttagaatgattctgtctagttcttatgtgaagatatttccttttctatcatggcctcaaagtgctccacatatccacttgcagattctgcaaaaagagtgtttcaaaactgctcaatcaaaagaaaggttcaactctgtgagatgaatgcacacatcacgaagaagtttctcagaatgcttctgtctagtttttatgtgaagatatttccttttccaccagaggccacacagcactccaaatatccacttggagattctacaaaaagagtgtttcagaactgctcaatcaaagaaaatgttcaaccctgtgaaatgaaggcacacatcacaaggaaattcctgagaatgcttctgtctagtttatgtgaagatattacctttaccaacagatgtcacaaagggcttaaaaaatccacttgcagattctaaaaaaagattgtttcaaaactgctcaatcaaaagaaaggttcaactctgtgagttgaacgcacacatcacaaagaactttgtcagaatacttctctgtagtttttatgtgaagatatttgcttttccaccataagcatcaaagcgctccaaatatccacttgcacactctataaaaagagtgtttcaaaactgctcaatcaaaagaaaggtgcagctcagtgagatgaatgcacacatcacaaagaattttctcagtatgcttctgtctagtttttatgtgaagacatttccttttccacaatagccctcaaagcactccaaatatccacttgcagattctacacaaagagtgtttcaaaacggttcagtcaaaagaatggatcaagacagtgatatgaatgcacacaccacaaagaagtttctcagaatgcttttgtctagttttaggtgaagatatttccttttacaccatagacctcaaactgctccaagtatccctttgcagatactacaaaaacagtgtttcaaactgcccaatcaaaagaaaggttgaactctgtgagatgaatgcacacatgaagaagaagtttctcagaatgcttctgacaaatatttatgtgaagatatttccttttccactatagactgcaaagtgctccaaatatccacttgcagattctacaaaaagagtgtttcaaaagtgctcaataaaaagaaagctttaactctgtgagatgaatgcacacatcacaaagaaatttctcagaatgcttctgtctagtttttatgcgaagatattgccttttccacttaaggccacatagcgctccaaatatccaattgcagattctacaaaaggagtctttcaaaactgttctatcaaaagaagggttccattctgtgagttgaatgcacacatcacaaagaagtttctcagaatgcttctgtctactatttatgtgaagatatttccttttccactacagacctcaaagtgctccaaatatccattggcagattttacaaaaagaatgtttcaaaagtgctcaatcaaaagaaaggttgaacactgtgagttgaatgcacacatcacaaagaagtttctcagaatgcttctctgtaggttttatgtgaagatatttcctttttcaccatacgcctcaaagagctccaaatatccatttgcggattcttcaaaaagagtgtttccaaactgctcaatcaaaggaaagttacaactctgtgagatgaaagaacacatcatgaagaagtttctcagaaagcttctgtcttgtttttatgtgaagatattttctgtttcaccatagtccagaaagggctcaaaaatagccctttgcagattctacaaaaagactgtttccaaactgctgaaccaaaagaaaggttcaactctgtgagatgaaagcacacatctcaaagaaatttctcagaaagtttctgtctggtttttatgagaagatgtttcctatttcatcacaggcctcaatgggctgagaaatatccctttgcagattctacaaaaggactttttccatactgctcaatccaaagaaagtttcacctctttgagttgaatgcacacatcacaaagaagtttctcagaatgcttctgcctagtttttatgtgaagatatttcctttttcaccataggccttaaacttctctcagatatccctctgcagatactccaaaaggctgtctataaactgctcagtcaaaactaagtttcaactctgtgagatgaaaggatacatctcaaagaagtttctcagaatacttctgtctagtttttatgtgaagatatttctttttcgatataggcctccaacttctcagaaatatccctttccagattgtacaaaaagactgtttccaaactgctcaatgaaaagaaactttcaactctgtgagatgtatgcatgcatcaaaaagaagcttctcagaaagcttctgtttatttttcatgtgaagatatttcctttttcaccataggcctcaaagcgctccaaatatccatttgcagattctgcaaaaagactgtttccaaactgttcaatcaaaagaaagtttcaaatttgtgacttgaaagcacacatcactaagaagtttatcagaaagcttctgtctagtttttatgtgaagatgtgtcctttttcaccataggtatcaatgggaacagaaatatccctttgcagatcctacaaaaagactgtttccaaactgctcagccaaaagaatggttcaactctgtgagatgaaagcacatatcacaaagaagtttctcagaaatcctctgtctagtttttatgtgaagatatttcgtttttcaccataggccttaaactgcttaaactctcacatatccctctgcagatactgcaaaaagactgtttccaaactgctccatcaaaggaaaggttcaattctgtgagatgaatggatacatcacaaagaagtttctatgaatacttctgtctggttttatctgaagatatttctttttcaccacagtcctcaaacttcgcagaaatatccctttgcagattgtacaaaaagactgtttccaaattgctcaatgaaaagcaaggttcaactctgtgagatgtatgcactcatcaaaaagaagtttctcagaaagcttctgtttagttttaatgtgaagatatttcctttttcaccataggcttcaaagcgctccaagtatccattagcagattgtacaaaaagactgtttccaaactgctcaatcaaaagaaaggttcaaatctgtgagatgaaagcacacatcactaagaagtttttcagaaagcttctgtctagtttttatgtgaagatatttcctttttcaacaaaggccttaatgggctcagaaatatccctttgcagatcctacaaaaggactgtttccaaactgctcaatcaaaacaaagtttcaactctgtcagatgaatggacacatcacagagaagtttctcagaatgcttctgactaggttttatgtgaagatatttcctttctcaccacagtccccaaaatgctcacaaatatctctctgcaggtactataaaagactgtttccaaactgctcaatcaaaaaaaaatttcaactttttgagctgaatgtacacatcataaagacggttctcagaaagcttctttctagtttttatgtggagatatttccttttacaccatagtccttaaaacactcacaaatatcactccgcatatactacaaaaagactgtttccaaactgctcaatcaaaagaaaagtcaactctgtgagatgaaagcacacataaaaaagaactttctacgaaagcttctgtctagtttttatgtgaagatattacttcttaagcagaggcctcaaacgactaacaaatatccctttgcagattgtagataaagactgtttccaaactgctcaatcaaaagaaaggttgaactctgtgagatgaatgcatacatcacaaagaagtttcatagaaagcttctgtttaatttttatatgaagatatttctgttttcaccatatatctcaaagagctcaaataaccatttgcaggttctgcaaaaagagtgtttcaatacttctcaatcaaaagaaaggttcaactctgtgagatgaaagcacacatcacaaagaagtttctcagaaagtttctgtctagtttttatgtgaagatatttcctatttccccagaggcctgaatgggctcacaaatatccctttgtagattttacaaaacgactctttccaaactgctcaatcaaaagaaattttcatccctgtgagatgaatgaacatatcaggaagaagttttgcagaatgcttctgtctaatttttatgtgaaaatattttgttttccactataggaatcaaagtgctccaaatagccacttgcagattgtaaaaaaagactctttcaaaactgctcaatcaaaagaaaggttgaagcctgtgagatgaatgcacacatcacaaagaagtttcccagaatgcttctgtctgatttttatgtgaagatatttcctttttcaccataggactcaatacactccaaatatcaatttgcagatactacaaatgactgtttacaaactacccaatcaaaagaaagttcaactctgtgtgatgaatgcacatatcacaagaaagtttctcagaaatttcggtcttgtttttatgtgaagatattacctatttccccaaaggcctcaatgggcccacaaatattccctttcagattctacaaaatgaatgtactgaagctgcacatcaaaagaaaggttcaccagtgtgagatgaaagcacacatcaccaggaagtttctcagaattcttcattctagattttatgtgaagatatttctttttccactacagacctcaaagcgctccaaatatccatttgcagatactataaagagagagtttcaaaactgctcaatcaaaagaaaggttcaactctgtgagatgaatgcacacaacacaaagaagtttcccagaaagcttcagtgtagttttaacatgaggatatttcgttttccaacataggcctcaaagcactcaaattaccatttgcagatactacaagaagactgtttccaaactgctctataaaaagaaatgtttaactctgtgagataaatgcacacatcacaaagaagtttctcaaaatgcttctgcctagtttttatgggaagatatttccttttttatcataggtctcaaatcgctgctaatatccatttgcagatactacaaaagactgctgccaaactgctcagtcaaaagaaagattcaactctgtgaaatgaatgcacacatcacaaagaagtttctcacaatgcttctgtctcattttatttgaagatatttccttttccaccatagaccacaaatcgctccaaatatccacttacagattctacaaaaagagtgttttcaaactgctcaatcaaaagaaaggctcatctctgtgagttgaaaacacacagcacaaacaagtttctcagaaagtttctgtctagtttttatgtgaagatatttcctatcatcccacaggcctcaatgggctcacaaatatccctctgtagattctacaaaacgatgttttccaaattgctcaatgaacagaaaggctcaactcggtgtaatgaatgcacacatcacaatgaagtttcttagaatgcttctgtctagtttttatatgaagatatttccttttccaccataggcctcaacgcgctccaagtatccccttgcagattctgcaaaaagtatgtttcaaaactgttcaatccggtggctcacgcctgtaatcccagcactttgggaggccgaggcgggcggatcacgaggtcaggagatcgagaccatcctggctaaaacggtgaaaccccgtctctactaaaaatacaaaaaattagccaggcgtagtggcgggcgcctgtagtcccagctacttgggaggctgaggcaggagaatggcgtgaacccgggaggcggagcttgcagtgagccgagatcccgccactgcactccagcctgggcgacagagcgagactctgtctcaaaaaaaaacaaaaaaaaaaaaactgttcaatcaaaagaaaggtacaacaacatgagatgaatgcacacataacaaagtagtttctaggaatgcttctctctggtttttatgttaagatatttactttttcaccataggactcaaagcccttcaaatatccatttgcagatattacaaaaagactgtttccaaactctttaatgaaaagaaaggttcaactctgtgagatgaaagaacaaatcacaaagtagtttctcataaagtttctgtctagtttttatgtgaaaatatttcctatttccccatgggcctcagttggctcacaaatacccctctggacattctacaaaatgactgcttccaaactgctgaatcagtagaaactttcaactctgttagatgaatgcccacaacacaaagaagtttctcagaattattctatctagtttttatgtgaagatatttccttttccacaataggcctttaagcactccaaacatccccttgcggattctacaaacagagtgtttcaaaactgctcaatcaaaagaactgttcaactctgtgagatgaatgcagacatcacaaggaagtttctcagaatgcctctgcctagtttttatgggaacatatttcctttttcaccataggcatcaaagtgctgttaatatccatttgcagatatcacaaaaatactgcttccaaactgtccaatcaagagaaagtttcaactctgtgagatgaaaggaaacatcacaaagaagtttctcagaaagtttctgtctagttttaatgtgaatatatttcctatcgccccatagacctcaatcggctcacaagtatccttttgcagattacacaaaacgatggttcccaaactgctcaatcacaggaaaggttcaaccctgtgaaatgaatgcacccatcaaaaagaagtttctcagaatacttctttatagtttttatgtgaagaagattccttttccaccatattccacatgcattccaaatatacacttgcagattctgctataagatggtttcaaaactgttcaatcaaaagaaaggttcaaatctgtgagatgaatgcacacgtcacaaagaagtttctacaaatgcttctgtctgattttatgtgaagatatttcctttttcaccgtatttcctttttcacccatcacagaaaagtttctcagaatacttctgtctcgtttttatgtgaagaagattccttttccaccatattcctcatgcgcttcaaacatacattgcagattctacaaaaagagtgtttcaaaactgctaaatcaaaagaaaagttctaatctgtgagatgaatgcacacctcacaaagaagtttctatgaatgcttctgtctgatttatattgaagatatttcctttttcaccgtaggcctcagagcgcttaaaatatccatttgcagatactagaaaaagactgtttccaaactgctcaataaaaataaagttcaactcagtgagatgaatgcacacatcacaaagaagtttctgagaaagattctgtctagtttttatttgaagataattcctatttcccaagaggcatcaatgggctcacaaatattcctttgcatattctacaaaatgactgtttagaagctgctcaatcaaaaaaaaagattcaacactgtgagatgaatgcgcacattcaaaggaagtttctcaaattcttctgtttggtttttatgtgaagatatttcctttttcactataggccacaaagctctcaaaatatccacttgcagattctacaaaaagagtgtttccacactgctcaatcaaaacaaaagttcaactgtgcgagatgaatgcacacatcacaaagaaatttctcagaatacttctccctagtttttatgggaagatacttcatttttcaacataggccaaaagtgctccaaatattcatttgcagattctacaaaaagactgttcccaaactgctcaatcaagagaaagtttcaacccggtgagttgaagtcacacatgacaaactagtttctcagaaagtatctgtctagtttttatgtgaagatatttcctatctccccagaagcctcaatgggctcacaaatatccctttgcagattctacaaaaagacagtttcaaaacggctgaatcaaaagaaaggttcaactctgtgagatgaatgcacagatcacaaagaagtttctcagaatgctgctgtctagtttttatgggaagatgtgtccttttccaccataggcctgaaagtgccccaaatatccacttgtagattgtacaaaaagactgtttcaaaactgctcaatcaaaagaaaagttcaaatctgtgagatgaaagcacacatcagaaagaagtttctcagaaagtttctgtctagtttttatgtgaagatatttcctatcaccccatacgtctcaatgggctcaaaaatatctctctgcagattctacaaaacgactgtttccaaactgttcaatacaaggaaaggttcaactccatgaaatgaatacacccaatcaggcagaagtttctcagaatgcttctgtctagtttttatgtgacagtgtttccttttctaccataggcctcaaagctctacaaatatccaattgaagatactacaaaaagtgtgtttcaaaactgctcaatcaaaagaatggttcaacttcatgagatgaatgcacacatcacaaagaaatttctcagaatgcttctgtctagtttttatgtgaagatatttccttttccaccataggcctcaaaacgctccaaatatccacttgcacactctacgaaagagtttttcaaaacttctcaatcaaaagaaagtttcagctctgtgacatgaatgcacacatcacaaagaagtttctcagaatgcttctgcctagtttttaggggaagatatttcatttttcaccataggcctcaaagtgctctaaatatccatttgcaggcgagaaaaagactgtgtccaaactgctcaatcaaaagaaaatttcagttctgtgagatgaatgcacatatcacaaagaactttctcagaatgcttcttgctggtttttatgtgaagatatttccttttccagcacaggcatctaagcactccaaatatccaattgaagattccacagaaagggtgtttcaaaactgctcaatcataagataggtttaactttgtgagaaaaatgcacacatcgcaaagaagtttttcagaatgtttctgtctactttttacatgaagttatttccttttccactataggcctcaaatcactccaaatatccacttgcagatcctacaaaaagagtgtttctgaactgctcaatcaaaagaaaggctcaactctgtgagatgaatgtacacataacaaagaggtttctcagaatgcttctgtctagtttttctgtgaagatatttccttttccactaaaggcctcaaagcactccaagtatccacttgcagattctacaaaaagagtgtttaaatacttctcaaaaaagaaaggttcagctcagtgagatgaatgcatacatcacaaagaacattctcagaatgcttctgtctagcttttatatgaagatatttccttttccatcataggcatcaaagtgctccaaatatccacttgcagattctacaaaaagagtgtgttaaaactgctcaatcaaaagaaagtttcaacacagggagttgaatgcgcacatcacaaagaagtttctctgaatgcttgtgtctgatttttatgtgaagatatttccttttccaccataggcctcaatgttcaccaaatatccagttgcagattctgaaaaaaagagtgtttcaaaactgctcaatcaaaagaaagtttcaactctgtgaaatgaatgcacacatgacaaagaagttcctcagaatgcttctgtcaagtttttatgtgaatatatttcctttttatttatttatttattttattattattatactttaagctttagggtacatgtgcacaatgtgcaggtcagttacatatgtatacatgtaccaccctggtgtgctgcacccattaactcatcatttagcattaggtatatctcctaatgctatccctggcctctcaccccaccccacaacagtccccagagtatgacgttccccttcctgtgtccatgtgttctcattgttcaattcccacttatgagtgagaatatgcagtgtttggtcttttgttcttgcgatagtttactgagaatgatgatttccaatttcatccatgtccctacaaaggacatgaactcatcattttttatggctgcatagtattccatggtgtatatgtgccacattttcttaatccagtctatcattgttggacattcaggttggatccaagtctttgctattgtgaatagtgttgcaataaacataagtgtgcatgtgtctttatagcagcatgatttataatcctttgtgtatatacccagtaatgggatggctgggtcaaatggtatttctagttctagatccctgaggaatcgccacactgacttctacaatggttgaactagtttacagtgccacccactgtgtaaaagtgttcctatttctccacatcctctccagcacctgttgtttcctgactttttaatgattgccattctaattggtgtgtgatggtatctcattatggttttgatttgcatttctctaatggccagtgatggtgggcattttttcatgtgttttttggctgcataaacatatttttttgagaagtgtatgttcatgtccttcgcccactttttgaaggggttgtttgtttgtttttttttcctttttaaacgtatgcctcaaagcactccaaatatccatttgcagttactacagaaagactgtttccaaactgctcaatcaaaagaaaggttcaactctgtgaaatgaatgcacacatcagaaggaagtttctcagaatgcttctgtctagttcttatctgaagatattccctatttccccagaagcctcagtaggctgaaaaatatccctctacagattctacaaaactactgcctccaaactgttcaatcaatacaaaggttcaagtctgcgaaattaatgcacacaagacaaagaagtttctcagaatgcttctgtatatttttaatgtgaagatatttcctttttcaccataggtctcaaagccctccaaatatcaacttgcagattctacagaaagactgattccaaactgcccaatcaaaagaaagtttcaactctgtgagatgaaagcacatatcacaaagaattttctcagaaattttctgtttagtttttatgtgaagatatttcctattacaccataagcctcaatgggaaaaaaaaacaccccttcacagattctacaaaatgatgggctccaaactgctcaatcaaaagaaagttaaaccctgtgaattgaatgcacatatcacaaagaagtttctcagaatgcttctgtaaagtttctatgtgaagatatttccttttccaatatgggacacaaaacgcccaaatatcgacttgcagattctacacaaagagtgtttcaaaactgctcaatcaaaagaaagtttcaaatctgtgagattaatgcacacatcacaaagcagtttctaggaatccttctgtctggtttatatgtgaggatacttccttcttcaccacaggcctcaaagagctccaaaaatccatttgcagatgctacaaaaagattgtttccaaactgctcaataaagagaaaggttcaaatatgagagatgaaaccacacaccacaaaggtgtttctcagaattcttctttgtggtttttctgtgaagatatttccttttccaccataggcctcaaagcacaacaaatgtccacttgctgattctataaagagtgtttcaacactgctcaatcaaaacaagggttcaactctgtgagatgaatgcacacaacacaaagaagtttctcagaatgcttctgtctagtttttatgtgaagatatttccttttgcaccatagggctcaaagctctccaaatatcaatctgcagatactacaaaaagactgtttacaaactgctgaatcaaaagaaaggttcaactccatgagttgaatgcacacatctcaaagaagtttctcagaaagcttctgactagtttttatgtgaagatgttttcttttccatcataggcctcaaagtgctaaaaatatccacttgaagattctacaaaaagagagtttcaaaactgctcaaacaaaagaaaggttcaactctgtgagatgaatgcacacatcacaaagaagtttctcagaatgcttctgtctagttttatgtgaagatatttccttttctactataggctgcaaagcactccaaataccaacttgcagattctgcagaaagagtttttcaaagctgctcaatcaaaagaaaagttcaacactttgagatgaatgcacacatcatgaagaagttcctcaaaatgcttctattttttatgtgaagatatatccttttctaccaaagaccgcaaagtgctccaaatatccccttgcagtttctactaaaagagtgtttccaaactgctcaatcaaaagaaagtttcaactctgtgagatgaatgcacacatcactaagaagtttctcagtaattttctgtctagtttttatgtgaagatatttcctttcctactatagacctgaaagtgctccaaatatccatttgcagatactgcaaaaagactgcttccaaactgctcaatcaaaggaaaggtccaactctgtgagttgaatgcatgcatcacaaagagatttctcagaattgttctgtctgttttttatgtgaagatatttgcttttccaccaatggcctcaaactctccaaatatccacttgcagattgtacaataagagtgtttcaaaactgctcaatcaaaagaaaggtttaactctgtgagatgaatgcacacatcacaaagcactttctcagaatgcttctctctagtttttatgtgaagatatttcgtttttcaccataggctgcaaagccctccaaatatccccttcagattctacagaaagagtgtttcaaatctgttcaatcaaaagaaaggttcaactctgttgatgaatgcacgcatagcagagcagtttctcataatgtttctgtctagttttcatgtgcatatatttccttttccaccacaggccccaaagcgctccaaatatccatttgcaggtactacaaaaagactgtttccaaactgttcaatcaaaagaaaagtttaaatctgtgagttgaatgagcacatcacaaataagttcctcagaatgcttctgtctagtttttatgtgaagatatttccttttccaccacaggccacaaagcactccaaatatccactggtagattctacaaatgtacgtttcaaaactactcaatcaaaagaaacgttcaactcagtgagacgaatgcacacatcacaaagttttttctcagaatgcttctgtctagttttcatttgaagatattttctttcataccataagccccaaagtactcccaatatctaccttcagattctacaaaaagtgtgtttcaaaactgcttaatcaaaagaaaggttcaaacctgtgagatgaatgcagacatcacaaagcagtttctcagaatgcttctgtctagttttgatgtgaagatatttcctttaacaccataggactggaagcgctccaaatattcacttgcagattctacaaaaagagtgttagcaaagacttggaaccaaaccaaatgtccaacaatgatagactggattaagaaaatgtggcacatatacaccatggaatactatgcagccataaaaatgatgagttcatgtcctttgtagggacatggatgaaattggaaagtaatctgaaaaagttttttgtgatgtgtgcattcatctcacagagataaacctgtcttttcattgagcagtttcggaactctctttttgaagaatctgcaagtgggcatttggagcgctttgaggcctatggtggaagaggaaatatgttcacattaaaactagacagaagaattctgagaaacttctttgaacctttcttttgattgagcagtttggaaacaatcatttgtggaatctgcaagtggacatttggagtttttttcatcctgtggttgaaaaggaattatcttccataaattttagacagaagctatctgagaaacttctttgtgatgtgtgtgttcatctcacagagttgaacctttgttttgattgagcagtttggaaacactctttttttagaatcagcaagtggacatttggagcactttgcggcctatgttagagaaggaaatatcttcacataaaatctagagagaaacaatctgagaaagctctttgtgatgtctgcattcagctcacagagttgaacctatcttttgatagagcagtttttaaagtctccttttgtagaatgtgcaactgcacatttttgcgctttgcggcctatgttagaaaaggcagtatcttcacataaaatctagacggaagcaatcgagaaatttcttagtgatatgtgctttcatcccactgagttgacactttcttttgattgagcagtttggaaacactcttttgtagaatctgcaaggggacattttgagcactttgcggcctatggtagaaaaggaagtatcttcacctaacatctacacagaagcaatgtgagaaacttctttgtgatgtttgcattcatctcacagagttaaacctttcttttgattgagcatttatgaaactctctttttgtaaattctacaaggggacatttggagcgctttgaggactatggtggaaaaggaaatatcttcacataaaaactagacacaagaattctgagaaatttctttgtgatatgtgcgttcgtctcacagagttgaacctttctttgaattgagcagtttggaaacactctttttgtagaacctgcaagtggacatttggagcgctttgaggcctgtggtggaaaagtaaaaatcttcacataaaaactagacagaagaattttgagaaacttctttgtgatgcgtggtttaatctcacagaattgaacatttcttttgatggagcagtttggaaacactctttttttagaatctgcaagcagacatttggagcgcttttgggcctattttagaaaggggaatatcttcatataaaaactagacagaagaattctgagaaacttttttgtgatgtgtgcattcatctcacagagttgaacctttccttgaattgagcagttttgacactctttttgtagaacctacaagtggacatttggagctctttgcggcctctgttggaaatatcttaacataaaacctacacagtagcaatttgagaaacttccttgtgatgtgtgcattcatctcacagggttaaacttttcttttgatggagcagttttgaaactttctttttgtaggatctgcaagtggacatttggagcactttgaggcctatggtggaaaagaaaataccttcacataaaaactagacagaagaattctgagaaacttctttgtggtgtgtgcattcatctcacatacttgaaacttccctttggttgagcagtttggaaaccctctttttgttgaatctgcaagtggacctttggagcgcattgtggcctatggtagaaaaggaaatatcttcacataaaatctagacagaagcaatatgagaaactacttttgatgtgtgttttcatctcacagatttaaagctttcttttgattgagcagttttgaaactctgtttttgtagaatctgaaagtggacatttggagcgttttgcggcctgtggtagaaagggaaaaatcttcaagtaaaatctagacagaagtaatctgagaagcttcttagtgttgtgtgcattaatctcacagacttaagcctttcttttgattgaacagttttgaaatactctttttgtagaatctgcaagtggacatttggagcgctttgatgtctattgtggaaaaggaaatatcttcacataaaaactatacagaagaattctgagacatttatttgtgatgtgtgcgttgatctcacagagttgaacctttattttgattcagcagtttggaaacactctttttctagaatctgcaagtggacatttggagcactttggggcctgttgtactaaaggaaatatcttcacataaaatctagacagaagcaatctgagaaacttctttctgatgtgtgcgatcatctcacagggttgaaactttcttttgattgagcagtttggaaacactctttttgtagcatctgcaagtggacatttggagcactttgaggcctgtggaggaaaagcaaaaatcttcacatgaaaactagtcagaagaattttgagaaacttctttgtaatgcgtgcgttaatttcacggagttgaacatttcttttgatggagcaatttggaaatactctttgtgtagaacctgcaagcagacatttggagcgcttttgggcctattttagaaggggatatcttcacataaaaactagatagaagaattctgagaaactactttgtgatatgtgcattcatctcacagagttgaacctttctttgaattgagcagttttgaaactctctttttgtagaacctgcaagtggacatttggagcgctttgcggtctctgtgaaaaaaggaaatatcttaacataaaatctacacagtagcaatctgagaaacttcgttgtgatgtgtgcattcatgtcacacagttaaaactttcctctaactgagcagttttgaaacgctctttttgtagaatctgcaagtggacatttggatcgctttgcggcctatgttagaaaaggaagtatctttacataaaatctagacagaagccataagagaaacttctttgtgttgtgtgcattcatctcacagagttaaagctttcttttgattgagcagttttggaactctctttttgtagaatctgcaagtggacatttggagcgctttgcggtctctgtgaaaaaaggaaatatcttaacataaaatctacacagtagcaatctgagaaacttcgttgtgatgtgtgcattcatgtcacacagttaaaactttcctctaactgagcagttttgaaacgctctttttgtagaatctgcaagtggacatttggatcgctttgcggcctatgttagaaaaggaagtatctttacataaaatctagacagaagccataagagaaacttctttgtgttgtgtgcattcatctcacagagttaaagctttcttttgattgagcagttttggaactctctttttgtagaatctgcaagtggacatttggagtgctttgaggcctatggtggaaaacgaaatatcttcacataaaaactagactgaagaattgtgagaaacttacttgtgacttgtacgttaatctcacagattttaacatttcttttgattgagtagttaggcaacgctcttattgtagaatctgcaagtggacatttggagtgctttgtggcctatggtagaaaaggaaatatctttacataaaatctagaaagaagcacactaaaagtttttgtgatgtgtgcagtcatctcacagatataaaccattcttttgattgagcagctttggaactctctttttgcagaatctgcaagtggacatttggagcgctttgaggcctatggtggaagaggaaatatgttcacataaaaactagacagaataatactgagaaacttctttgtgatttgtgcattcatctcactgagttgagcctttcttttgattgagcagtttggaaacaatctttttgtagaatctgcaagtggacatttggagctcattgcatcctgtggttgacaaggaaatattttcacataaattgtagacagaagaaatctgagaaacttctttgtgatgtgtgcgttcatctcacaaagttgaacctttattttgatagagcagtttggagacactctttttgtagaatctgcaagtggacatttttgtgctttgcggcctatattagaaaaagcagtatcttcacataaaatctagacagaagcaatctgagaaacttcttagtgatatgtgctttcatctcagatagttgaaactttcttttgattgagcagtttggaaacactctttttgttgaatctgcaagtggacatttggagcgctttgcagcctattgtagaaaaggaaatatcttcactttaatctagacagaagcaatctgagaaacttatttgtgatgtgtgcattcatttcacagagttaaacctttcttttgattgagcatttatgaaactctcttttttaaaaatctacaagcggacatttagagctctttgaggaatatggtggaaaaggaaatatcttcacataaaaactagacagaagaattctgagaaacttctttgtgatgtgtgcattcatctcacagagttgaacctttctttgaattgagcagtttggaaacactctttttgtagaatctgcaagtgaacatttagagcgctttgtggcctctgttagaaaaggaaatatcttcacataaaatctagacagaagcaatctgagaaacttccttatgctgtgtgcattcatctcacacagttaaaactttcctttgattgagcagttttgaaactctctttttgcagaaactgcaagtggaaatttggagcgctttgaggcttatggtggaaaaggaaatatcttcaaataaaaactaaacagaagaattctgagaaacttcttggtgatgtgtacgttcaactcacagagttgaaccattctcttgattgagcagtttggaaacactccttttgtagaatctgcaagtgaacatttggagtgctttgcagcctatggtagaaaaggaaatatcttgacataaaatctagacggaagcagtctgagaaacttcttcgtgatgggttaattcacctcacagagttaaaactttctttagattgagcagttttgaaactctctttttgtagaatctacaagtggacatttagagcgctttgaggcctatggtggaaaaggaaataccttcacatagaaactagacggaagtattccgagaaacttctttgtgatgtgtgcgttcatctcatagagttgaacctttctttggattgagtagtttggaaacactctttttgtagaatccgcaagtggacttttggaacgctttatggcctatggtagaaaaggaaatatctttcacataaaatctaggcagaagcaatctgagaaacttctttgtgatgagtgcattcatctcacagagttaaagctgtcttttgattgagtagttttgaaactctctttttgtactatctgcaagtggacatttggagagctttgaagcttatggtggaaaaggaaatatcttcacataaaaattagatagcagcattcagagaaacttctttgtgatgtgtgcattcatctcccagagatgaacctttcttttgaaggaccagttttgaagtactctttttgtagaatctgcaagtggacacctcgagcgccttgaggcctatgttggaaaaggaaatatcatcacataaaaactagacagaagaattctgagaaacttatttttgatatgtgcgttcatatctctgagttgaacttttcttttgattgaacggtttggaacactctttctgtagaatctgcaagtggacatttggagtgccttgcgacttaaggtggaaaaggaaatatcttcacataaaatccagacagaagcaatctgagaaacttctttacgatatgtgtattcatctcaaagggttaaccccttcttttgattcagcagttttgaaactctctttttgtagaatctgcaattggacatttctatcgctttgaggcctatggtggaacagagtatatcttcacataaaaactagacagaagaattctgagaaacttctttgggatgtgggcgttcatctcacagaattgaacctatgttatgatttagcagttttgaaacactctctttttagaagctgtaagtggataattggagtgctttaaggcctaatgtggaaaaggaaatatcttcacatgaaaactacacagaagcattctgagaaacttctttgtgatgtgtacattcaattcacagaggtgaacctgtgttttgattgcgcagttttgactctactttttggtagagtctgcaactggataattggagacttttgtaccttatggaggaaaaggaaatatcttcaagtaaaaacttcacagaagcattctgagaaacttctttctgatgtgtgcattcatctcacagagttgaaccttatgtggaaaagcaaatatcttgagataaaaactacacagaacccttctgagaaacatctttgtgatgtgtgcattcatctcatagtgttgaacctatcttatgattgagcagttttgaaacactcttcttgtggaatctgcaagtggataataggagcgctttgaggcatactgtggaaaagtaaataacttcacgaaaaaactacaccatggcattctgagtaacttctttgcaatgtgtgcattcgtctcagagagttgaacctttcttttgattgagcagctgtaaaacaccctttttgtagaatctgcaattggatatttggagcgctttgacgcgtattgtggaaaatgaaatatctttaaataaaaactacacagaagcattctgagaaacttctttgcgatgtgtgaattcaacacacagagttgaaccaatcttttgtttaagcagtcttgaatctctctttgtgtagaatctgcaagtggatattgggagtcctatgcagcctgtggacgaaaaataaatatcttcaaataaacactacacagaagaatttgagaaacttctgtgtgatgtatgcattcatctcacagagttgaagctatcttatgattgagcagattttaaacactctctttgtagaatctgctagcagatatttggagcactttaaggcctactgtgaaaaaggaaatctcttcacataaaaactacacagaagcattctgagaaactcctttgtgatgcctgcattcatttcacagagttgaacgattcttttgattgagcagttttgaaacactgtttctgtagaatctgcaagtggacatttggagcacttttagacctactgtggagaagcaaatatcttcacataaaaactacacagaagcattctgagaaacttctttatgatgtgtgcattcacctcacagagctgaacctttcttttgattgagcagttttgaatctctcttttcgtgaatctgcaagtggatatttggagccctttggggcatatggaaaaaaaggaaatatcttcaaataaaaactacacagaagaattctgagaaatttctttgtgatgtgagcattcatctcacagagttgcacctatgttattattcagcactttggaaacactatttttgttgaatctgcaagtggacatttggagggttttgaggccatctgtggaaaagcaaatatgttcacataaaaactacacagaatccttctgagaaacatctttgtgatgtgtacattcatctcacagagttgaacctatcttatgattgatcagttttgaaacattctttttgtagaatctgcaattggataattggagcgctttcaagcctattgtggaaaaggaaataacataaaaactacacagaagcattatgagaaacttctatgggatgtgtgcattcatctcacagaattgaatctatcttatgatttagcagttttgaaacactgtagaatctgcaagtggatatttggagcgttttgagggtttttgtggaaaaggaaatatcttcacataaaaactacacagaagcattctgagtaacttctttgtgatgagtgcattcaactcgcagagttgaacttatcttttgattgagcagctttgaatctctgtttttctagaatctgcaagtggatatttggagcctgatgtggcctatggacgatgaggaaatatcttctagtaaacactacagagacccatactgagaaacttctttgtgatgtgtgccttcacatcacagagttgaacctatcttatgattgagcagatttgaaacacttgatttgtagaatctgcaagtggatatttggagcgctttgaggcctcctgtggaaaagcaaatatcttcacattaaaattatatggaagtattctgagaaacttcttcatgatgtgtgcattcatctcacagagttgaaactttcttttgattggactgttttaaaacactgttttcgtaaaacctaaaagtggatattggagcactctgaggcctactatggaaaagcaaatatcttcacataaaaactacacagaagtattctgagtaatttctttgtgatgtgtgcattcatctcacagaattgaacatttccgttgaatgagcagttttgcaaccctttttttgtagaatctgcaagtggatatttggaaagctttgaggtctattgtggaaaacgaaatatctacataaaaaaactacacagaagcattctgagaaactactttgtgatgtgtgcattagaatcacagaggtgaacttatcttttgattgagcagttttgaatctctctttttgtagaagctgcaagttgatatttggagccctttgcggcccatggaggaaaaggaaataccttcaattaaaaactacacagaagcattctgagaaacttctttgtgatgtgtgcattcatctcacagagttggacctatcttatgattcagcagttttgaaacactgtttttgttgaatctgcaagtggatatttggagtgctttgaggccatctgtggaaaagcaagtatctttggataaaaactacaaagaatacttctgagaaatatctttgtgatgtgtgcattcatctcacagagttgaacatatcttatgattgatcagttttgaagcattctttttgtagaatctgcaagtggataattggagcgctttcaagcctattgtggaaaaggaaatatcttaacataaaaactacacagaagcattctgagaaacttctttgggatgtgtgcattcatctcacagaattgaacctatgttatgatttagcagttttgaaacactctctttgtagaatctgcaagtggatatttggagcgttttgaggttttttgtggaaaaggaaatatcttcacataaaaactacacagaagcgttctgtgaaacttctttgtgatgagtgcattcgtctcacagatttcaacataccttctgattgagcagttttgaatttctctttctgtaaaatctgcaagtggatattttgagccctttgtggcctatggtggaaaaggaaatatcttcacataaaaacttcacagaagcattctgagaaacttctttggttgtgtgcattcaactcacagtgttgaaattatcttttgcttgagcagttctgcatctctctttttgtagaatctgcaattggatatttggagccctttgaggtgtatggagaaaaaggaaatatcttcaaataaaaactacacagaagcattctgataaacctctttgggatgtgtgctttcatctcacagagttgaacttatcttatgatagagcagttttgaaacactctctttttagaagctgtaagtggataattggagtgctttaagacctaatgtggataaggaaatatcttcacatgaaaactacacagaagcattctgagaaacttctttgtgatgtgtacattcatctcacagagttgaacctgtcttttgattgcgcagttttgactctaccttttggtagattctgcaactgaatatttggagacttttgccccctatagaggaaaaggaaatatcttcaaataaaagcttcgcagaagcattctgagaaacttcttcgtgatgagtgcattcatcaaacagagttgaacacttcttttgattgagtagttttgaaacagtcttgttgaagaatctgcaagtgcatatttggagcactttggggtctactttggaatagcaaatatcttcacataaaaagtacacagaagccttctgagaaacttcttagtgatgtgggcattcatctcacagagttgaacttttcttttgatagagcagttttgtaaaactctttttgtagaatctgcaagtggatatatggagcgctttgatgcctattgtggaaaaggaaatatcttcacgtaaaaactatgcaaagcattctgagaaagttctttgtgatgtgtgcattcatcttatggattcgaacctatcctttgattgagcagttttgaatctctctgtttctagaatctgcaagtggatacctggagccctttgcagcctagggtggaaaaggaaatatcttcaaataaaaactacacagaagcattctgagaaacttgtttgtgatgtatgcattcatttcacagaattgatcctatcttatgactgagcagttttgaaacactctttttgttgaatctgcaagtggatatttggagcactttgaagcccattgtgtaaagggaaataccttcacataaaaactacacagaagcattctgagaaacttctttgtgatgtgtgcattcacctcacagagttgaacgtatcttatgatttagcagtttggaaacaccctctttgtagaatctgcaactgtatatttggagcattttgaggcctactgtggaaaagcaaatatcttcacataaaaactacaaagaaacattctgagaatcttttttgtgatgtgtgcattcatctcatagagttgaacctttcttttgattgagcaattttgcaacacattttttgtagaatctgcaagtggatatgtggaggcctttgaggtctcctgtgtaaaaggaaatatcttcacataagaactacacagaagcattctgagaaacgtctttgtgatgtgtgcattcaactcacagagttcaacctgttttttgattgaggagttttgaatttttctttttgtggaatctgcaagtggatatttagagccctttgttgcctattttggaaaaggaaatatcttcaaataaaaactacacagaaacattctgagaaacatctttgttatgtcagcattcatctcacagagttgaacctatcttatgattgagcagttttttgaaactctatgtttgtagaatcagcaaatggatattttgagcgctttgtggcctattgtggaaaaggaaatatcttcacataaaaactacacagaagcattctgagaaactcctttgtgatgtgtatattcatctcaaatagttgaacatttctttcgatttagcagttatgaaacactgtttttgtagaatctgcaagtggatatttggagcgcttggagacctattgtggaaaaacaagtatcttcatataaaaactacacagaagcattctgagaaactgctttgtgatgtgtgaagtcatctcctagaattgaacctttcttttgattgaacaggtttggaacactctttttgtaggatctgcaagtggatatttgcggtgctttgaggactatttaggaaaagaaaatatcttcacataaaaattacacagaagcattctgagaaacttctaggcgatgtttgcattcatctcacagagttgaacctttcttttgactgagcagtttggaaacactctttttgtagaatctgctagtggatatttagagagtttggggcctatggtggaaaaggaaatatcttccaaagaaaactacacagaagcattctgagaaaattctttgtgctgtgtgcattcaactaggagagttgaacctatctttcgattgtgcagttttcaatctctcttattgtagaatctgcaaggggatattttgagccctttgcagcctgtggtggaaaaggaaataatttcacataaaaactgcacagaagaattctgagaaacttctttgtgatgtgtgcattcatttcacagagttgaatgtttattttgattgagctgttttgaaacactgcttttgaagaatctgcaagtggatatttggagctgtttgagggctacagtggaaaagcaatatcttcacatgaaaactacacagaagcattctgagaaacttctttgtgatgtgtgccttcatctcacagagttgaacctttcttttgatggagcagttttgaatctctctttttgtagaatctgcaggtggatattttgagccctttgcagcctatgcaggtaaaggaaatatctaaaaatataaacaacacagatgcattctgagaaacttctttgttatgtgtgcattcatctcactgtgtggaacctatgttatgattgagcagttttgatacactctctttgtagaatctgcaagtggatatttggagcactttgaggcctattgtggaaaaggaaattcttcatataaaaactacacagaagtattctcagaaacttctttgtgatgtgtgcattcatctcacagagttaaacttttatttgactgagcacttttgaaacactgtttttgtagaatccgcaactggatatttggagtgttttgaggcctactgcagaaaagcaaatatcttcaaataaaaactacacagaggcattctgagaaacttctttgtgatgggcgcattcatctcaaagagttgaacctttcttttgattgagaagttttgaaacactctttttgtagtatctgcaagtggatagttggagtgctttgaggcctattgtggaaaagtaaagatcttcacataaaaaatacacagaagcattctgagaaactacattgtgatgtgtgcattcaactcacaagtttgaacctatcttttgattgagcagttttgaatctctctgtttgtagaatctgcaagtggatatatgtagccctttgcagcctatggaggaaaaggaaatatcttcaaataaaaactgcacagaagcattctgagaaacttcttcgtgatgtgtgcattcaactcgcagaggtgaatctttctttggttgaatagttttgaaacactctttttgtagaatgtgcaagtgggtattttgagggctttgaaacctattgtggaaaaggatatatcttcatataaaaattacacagaagcattctgagacacatctttatgatatatgcattcaactcacatagttaaatctatcttttgattgagcagttttgactctctctttttgaagaatctacaagtggatatttggagccctttacagcataaggtggaaaaggaagtatcttcaagtaaaaactacacagaagcattctgagaaacttatttttgatgtgtgcattcatctcacagagttgaacctatcttatgattgagcacttttgaaacaatctttttatagaatctgcaagtggaaatttggagcactttgaggactattgtggaaaagcatgtatcttcacataaaaactgcacagaagcattctgagaaacttctttgtgatgagtgcattaatcacacagagttgaacctatcttttgattgagtagttttgaatctctctttttgtagaatctgcaagtggatattaggagccctttgtggcctcttgtgataaaggaaatatcttcacaaaaaaactacacagaagcattctgagaaactactttgtgatgagtccattcaccacacagagttgaaaatttctttcactgaacagttatgaaacacactttttgtagagtctgcaagtggatatctggaaggctttgaggcctattttggaacaggaattatcttcccataaaaactacacagaagcattctgagaaacttctttgtgatgtgtgcattcatctcacaaagatgaacctagtttttcattaagcggttttgaaacactgtttttgcgaatctgtaagttgatatttgtggcactttgaggctgacattggaaaagtaaatatcttcacataaaaactacacataaacattctgagaaacttctttgtgatgtgggcattcacctcacagagttgaaactttcttttgattgagcagttttgaaacactatttttgtagaatctgcaagtgtatatttttagtgctttgaggcgtattgtgtaaaaggaaatatcttcacataaaaactacacagaagtattctgagaaacttcattgttaagtgtgcattcaactcacagttttgaatctatcttttgattgagcacttttgtatctctctttttgtaaaatctgaaagtggatacttggagaccttggcggcctatggtggaaaaggaaatatcttcacataaaaactacacagaagcattctgagaaacttctttgtgatgtgtacttttgtctcacagagctgaacttttcttttgattcagcagattggacacactctttttgtataatcttcaactggatatttggagccctttgaggcctattgtgtaaagggaaacatcttcacataaaaactacacagaatcattctgagaaacttccttgtgatgtgtgcattcatctcacagggttgaacctttcttttaattgaacagtttggaaacacaatttttgtagaattttcaggtggataattcgatctctttgaggcctatgttggaaaaggaaatatcttcacataaaaactacacagaaacattttcagaaacttctttctgatgtgtgcattcagctcacaggggtgaacctatctcttgattgagcagttttgaaactctctttttgtagaatctgtaagcggatatttggagttgtgtaaaaggaaatatcttcacataaaaactacacagaagcattcacagaaactactttgtgatgagtgcatacatcacaaagagttgaaattttccttcgattgagcagctttgaaacactcttttgtagaatctggaagtgcatatttacagggctttgaggcctatttgagaaaggaaatatctttacataaaaactacacagaaacattctgggaaacttctttgtaatgtgtgcattcaactcacatagttgaacctatcttttgattgagaagttttgaaactgtccttttgtaaactctgcaggtggatatttggaccgcatagcagcctatggtgaaaaaggaaatatcttcacataaacactacacagtggcattctgagaaacttctttgtgatgtgtgcattcatcacacggagttgaagcattcttttgattaagcagttttggaatactctttttgtagaatcttcaagtgaatatttggagcgctttgagggctattgaggaaaaggaaatatcttcacagaaaaactacacagaaggattctgagaaacttttttgtgatgtgtgcattcatcacacagagttgaaactttcttttgattgagcagttttaaaaccctctttttgtagaatcttcaagtggatatttggggggctttgaggcctattgtggaaaaggaaatatcttcacacaaaaaatacacagaagcattctgagaaactactttgtgttacgtgcattcatctcacagagttgaaacttgcttttgattgagcagtttggaaacactctttttgtagaatctacaagtggatatttggtgcgcttcaaggcctattttgtaaaagcatgaatcttcacataaaaactgtacagaagcattctgagaaacttctttgtgatgtgtgcattcaactcacacagttgaacctaccttttgattgagcagttttgaatctctctttttgtacaatctggaattggatgtttggagtgctttgagttcttttgtggaaaaggaagtatcttcatcaaaaactacacagaatcattctgagatactttattttgatgtgtgcattcatctcacagagttgaacttttcttttgattcagcagctttataacatgcttttagtagaacattcaagtggatatttggggggctttgaggcctattgtggaaaacgaaatatcttcacatgaaaactacacagaagcattctgagaaacttctttgtgatgtgggcattcatctcacagagttgaacctttgctttgattgagcagttttgaaaaacactttttgtagaatctgcaagtagatatttggagcgctttgaggcctattgctgaaaaggaaatatcttcacataaaaattacacataaacattctgagaaacttctttgtgatgtgtgcattcctcccactgagttgaacaattcttttcattgagcagttttgtaacagtctttttgtagattccgcaagtggataattggaatgctttgaggcctattgttgaaaagaaaatatcttcacttagaaactacacagtagaattctgagaaacttcttcgtgatgtgtgcattcaattcacagaattgtatcattcttttgattgagcagtttggaaacattctttttgtagaatctccaagtggatatttggagctttttgcagcctacagtggaaaaggaaatatcttcacataaaaactacacagaagcatcggagaaacttctttgtgacgtgtgcattcatctgacagagttgaagcattcttttgattaagcagttttgaaatactctttttgtagaatcttcaagtggatatttggcgcgtttgacggctattgcgtaaaaggaaatatcttcacataaaaactacagaggaacagtctgagatactttttgtgatgtgtgaattcatttcacagaggtgaacctttctttggattgtgcacttctgaaatactcttttagtgcgatctgcaggtagatatttgcagtgctgtaaggcgtactgaggaaaaggaaatttcttcacataaaaaatacacagaagcattcttagaaacttatttgtgatgtgtgcattcaactttcggagttgaacctatcttgttgagcagttttgaatctctctttttttggaatctccaggtggatatttggagcgctttgaggcctatggtgtaaaaggaaatatcttcacataaaaactacacagaagcattctgagagactactttgtgatgtatgcattcaactcatagagtcgaacctaccttttgattgagcagttttgaatatctctttttgtagaacctgaaagtggatatttgaagacatttgcggcttgtgttggaaaaggaaatatcttcacataaaaactacacagtagcattctgagaaacttctttgtgatgtgtgcattcatcacacggagttgaagcattcttttgattaagtagttttgaaatactcttttggtagaatcttcaagtggatatttggagcgctttgagggctattgtggaaaaggaaatatcttcagttaaaaattacacagaagcattctgagaaactttgttgtgatgtgtgcattcatctcacagagttaaaattcttttgattgagcagtttggaaacactccttttgtagaatctgcaagtggatatttggagggctttgaggcttacggtggaaaaggaaatatcttcacatgaaaactacacagaaacattctgagattcttctcagtgatgtgtgcattcaattcacagagttgaacctatcttttgatagagcagtttggcaactccctttttgtaggacatgcaaggggatatttggagctctttgcagcctatggtggaaaaggaaatatcttcatataaaaacaacacagaagcattctgagaagcctctttgttgtgtgtgcattcatctcacagaattgaaaattttttttgattgagcagttttgaaacactctttttgtagaaaatgcaagtggatattttgagtgctttgaagcctattgtggaaaaagaaatatcttcacagaaaaactacagagaaacattctgagaaacttctttcttatgtgtgcattcatctcacagagttgaacctatcttttaattgaacagttttgaatctctcctttgtagaatctgtaagtggatatttggagccctttgcatcctatgatggaaagaaaatatcttcacataaaaactacacagaagcattctgagaaaactctttgtgatgtgtgctttcatctgacagagttgaacctttcttttgattgagcagttttgaaacactccttttgtagtatctgcaagtgaatatttggagtgctttgaggagtatcatggaaaaggaaatatcttcaaataaaaactacacagaagcattctgagaaactactttgtgatgtgtatattcaactcacagagttgaacctatctttttcttgagcagttctgaaacactctttttgtagaatctgcaagtggatatttggagccctttgaggcctatcgtgggaaaggaaatatcttcacataaaaactacacagaagcattctgagaaactactttgtgatgtgtgcattcatctctcatagttgaaacttacttttgattgagcaattttaaaatactctttttgtagaatctgcaagtggatatttggaggattttggggcctattgtggaaaaggaaatatcttcatataaaaagtacacacaggaaatctgataatctttgtgatgtgagcattccgctcatagtgttgaaaatttattttcattgatcagttttgaaacactctttttgtataatctgcaattggatatttggagcactttgaggcctatggtggaaaaggagatattttcacataaaaactacacagttgcattctgagaaacttcttgattatgtgtgctttcatttcacagagttgaaactttcttttgatttagcagtttggaaaaactccttttttagaatctgcaagtggatatttggagggctttcaggcctagttttgaaaaggaaatatcttcacataaaacctacaaagaaggattctgagaaacttttttgtgatatatgcattcaaatcacagagttgaacatatctgttgattgagcagttttgaaactctctttttgtagaatctggaagtgggtatttggagccgtttgtggcctgcagttgaaaagggaatatcttcagatagaaactacacagaagcattctgagaaacttatttgtgacgtgtgcattcatctcacagagttgagcctttcctttgattgagcagtttgaaaacactctttttgtagaatatgcaattgaatatttggagccgttcatggcatatggtgtaaaaggaaatatcttcacataaaaactacacggaagcattctgagaaacttcttggtgatgtagctttcatcacacagagtagaatatttcttttgattgagcacttttgaaacacactttttgtagaatctgcaagtggatatttggagagctttgaagactattgtggaaaaggaaatatcttcacaggaaaagtacacagaatcattctgggaaatgtcttgtgacgtgtgcattcatctcacagagcgctttgaggcccattgtggaaaaggaaatatacacatgaaaactaaacagaagcattctgagaaacttctttgtgatttttgcattcatctcacggtgttttaacattcttttgattgagcagtttgaaaacactcttttagtagaatctaaaagtggatatttagagcgctttgaggactattgtggcaattgaaatatcttcacataaaaactacacagaagcattctgagaaacttccttgtgatgtgtgcactcaactcacagagttgtacctatctattgatagaggattttagaaactctctttttggagaatctgcaagtgaatatttggagccctttgtggcctactgtgtaaaaggaaataccttcacataaaaactacacagaaggccgggcgcggtgtctcacgcctgtaatcccagcactttgggaggccgaggcgggcggatcacgaggtcaggagatcgagaccatcccggctaaaacggtgaaaccccgtctctactaaaaatacaaaaaactagccgggcgtagtggcgggcgcctgtagtcccagctacttgggaggctgaggcaggagaatggcgtgaatttgggaggcggagcttgcagtgagccgagatcccgccactgcactccagcctgggcgacagagcgagactccgtctcaaaaaaaaaaaaaaaaaaaaaaaaaaaaaactacacagaagcactctgagaaacttctttgtgatgtgcgcattcatctcacagagttgaacctttctttagactgaacagtttggaaactctctttttgtagaatctgcaaatggatatttgaaacactttgaggcctactgtggagaagaaaatatcttcacataaaaactgacacagaagcattctgataaactactttgtgatgagtgcattaatctcacaaagttgaacctttcttttatttgagcagtttggaaacaatctttacagaatctgcaggtggatatttggagcactttgaggcaaattgtggaaaaggaaatatcttcacataaaaactgcacagaagcattctgagaaacttctttatgatgtgtgcattcaactcacagacttgaacctttcttttgattgaacagttttgaaacactctttttgtagaatctgcaagtgtatatttgtaaccctttgaggcctactgtggaaaaggaaatatcttcacataaaaactacatagaagcattctgagaaacttctttgtgatgtgtgcattccccttaaagagttgaacctctcttttgattgcgcacttttgaaaccccctttttgtagaatctgcaaggtgatatttggagccctttaaggcctattttggaaaaggaaatatcttcacataaaaactacaccaaagtattgtgagaaacttcttcatcatatgtgaattcgtctcatagagttgaacctttcttttcattgatcagtttggaaacactctttttgtaacatctgcaggtggatgtttggagcactttgtggcgaatggtgtacaaggaaatatctttacataaaaagtacgcagaagcattctgagacaccactttgagatgtgtgcattcaagtcaccgggttgagcctatctttttatagagcagttttgaaactctatctttgcagattctgtaagtggatatttggtgtgttgtgcagccaagtgtgaaaaaggaaatatcttcacataaaaaccacacaaaataattctgagaaacttctttgtgttgtgtgcattaatctcacaaagctgaacctttcttttgattaagcagttttgaaacactcgttttgtagaatgtgcaagtcaatgtttcgagcactttgaggcctattgtggaaaaggaaatatctttacataaaaactgcaaagaagcattgtgagaaactactttgtgacgtgtgcattcatcacacagagttgaacctttctttttattgagcagtttggtaacactctttttgtataatctccaaggggatatttttagcgctttgagatctttggtgggaaaggaaatatcttcacatagaaactacacagaagcattctgagaaacttatttgggatgtgtgcattcatctcaccgagttgaatctatcctatgattgagcagtttttaatcactctttttgtagaatctgcaagtggatatttggagcacatttagacctatggtggaaaaggaaacatcctcacataaaaactacaaagaagcattctgagaaacttctttttgatgtgtgcactcatctcacagagttgaacctttattttgattgagcagtttggaaacactctttttgcagaatttggacgtgtatatttggagtgctttgtggcctgttgtggaaaagaaaatatcttcacataaaaactacacagaagcattctgagaaacttctttgtgatgtgtgtattcatctcagagggttgatcctttcttttgattgaccagtttggacacactcattgtagaatctgcaagtggatacttggagcgctttgaggcctatggtggaaaaggaaatatcttcacataaaaactacacagaagcattctcagaaacttttttgtgatgtctgcattcgactcacacagctgaacctatcttttgattgagaagttttgattctctctttttgtaaaatctgcaagtggatatttgcagacctttctggcctattttggaaaaggaaatatcttcacataaaaaaatagaagcattctgagaaacttctttgtgatgtgtgcgttcatctcaaaaagttgaacatttcttttgattgagaagttattattattattatactttcagttttagggtacatatgcacattgtgcaggttagttacatatgtatacatgtgccatgctggtgcgctgcacccactaactcgtcatctagcattaggtatatatcccaatgctatccctcccccctcctcccatcccacaacagtccccagagtgtgatgttccccttcctgtgtccatgagatctcattgttcaattcccacctatgagtgagaatatgcggtgtttggttttttgttcttgtgatagtttactgagaatgatgacttccaatttcatccatgtccttaaaaaggttatgaactcatcattttttatggctgcatagtattccatagtgtatatagactggattaagaagatttagtagtttttaaaaaaactttttgtaatatctgcaaggggatatttagagcgttttggggcctattgtggaaatggaactatcttcatataaaaactagacagaagcattctgagaaacttttggtgatctgtgcattcaactcacagctttgaacctttcttttgattgaagagttttgaaacactctttttgtagtatctgtaaatggatatttgaagcggtttgaggtctatcttggaaaaggaaatatcttcacatataaactagacagaagcattctgagaaacttctctgtgataagtgccttcacctcacagagttgaacctttcttttgattgagcagttttgaaacactctttttgttgtatatgcaagtggatatttggagcgatttgtggtctatggtggaaaaggaaatatcttcacgtaaaaactagacagaagcactctgagaaacttctttgtgatgtgtgcattcatctcaccaagcggaaccattcttttgatggagctgttttgaaatactctttttgtagaatctgcaagtgaatatttggagtgctttcaggcctgtggtggaaaaggaaatatcttcacataaaaactagacagaagcattcggagaaacttctttttagtgtgtgcattcatctcacagtgttgaaactttcttttgattgagggttttgaaacagtctttttgataaatctgcaagtggatatttggagcgaattgtggcctatggtttaaaaggaaatatcttcacataaaagctagacagaagctttctgagaaacttctttgtgatatgtgcgttcatctcaccgggttgaatctttcctttcatcgagcaatattgaaacacccttttttttgaatctgaaatagatatttggagcgattgtgtcctatggtagtaaaggcaatattttcacagaaaaactagacagaagcattctgcaaaacttcctcgtgatgtgttcatttatctcaccaaattgaaccattcttttccttgagcagatttgatacactctttttgtagaatgtgcaagtgaatatttggaacgctttgatgagtttgacggaaaaggaaataccttcacatataaacgagacagaagcattctgagaaacttctttctgatatgtgcattcaactcacagagttgaacctttcttttgattcagcagttttgaaacacactttttgaaggatctgtaagtggatatttggagtgcttaggggtcgatgctagaaaggaaatatctccacataaaaacttgatggaagcattctgagaaacttctttgtgatgtgtgcattcatcagagagagtttaacatttcttttgactgagcagttttgaaactctctttttgtagaatctgcaagtggacatttggagccacttgaggcctattgtggaaaagggaataaattcacataaaagctacacggaagcattctgacaaacttctttgtgatgtgcacattcatctcacagattgaaaatttcttttgattgagcagttttgaaatgctcttttcggagaatcagccagtggatatttggagcactttgaggactatggtggaaaaggaaatatcttcacataaaaactagaggaaacattctgagaaacttatttgtgatgtgtgcattcctctcacagagttgaacatttcttttgattaagcagttttgaaacactcttttgtggaatctgctagaggatatttggagcgctttgaggcctatggaggaaaaggaaatatcttcacttaaaaactagacagaagcattctgagaaacttctttgtgatgtttgcattcatctcacagggttgaaattttcttttgattgagaagttttgagacactctttttgtagaatctgcctgtggataataggagcgctttggggcatattttggaaaaggaaataccttcacataaatagtagacagaagcattctgagaaacttctttgtgacgtgtgcatatatatcacagagttgaacctttcttttcatttagccttttgaaacactctttttctagaatctgcaagtgaatatttggagcgctttgcggcctatggtggaaaataaatatcttcacataaaaactagacagaagcaatctgagaaactactttgtgatgtgtgcattcatctcacagagttgaacctttcttttgattgagcagttttgaaacactctttttgttgtatatgcaagtggatatttggagcgatttgtggtctatggtggaaaaggaaatatcttcacgtaaaaactagacagaagcactctgagaaacttctttgtgatgtgtgcattcatctcaccaagcggaaccattcttttgatggagctgttttgaaatactctttttgtagaatctgcaagtgaatatttggagtgctttcaggcctgtggtggaaaaggaaatatcttcacataaaaactagacagaagcattcggagaaacttctttttagtgtgtgcattcatctcacagtgttgaaactttcttttgattgagggttttgaaacagtctttttgataaatctgcaagtggatatttggagcgaattgtggcctatggtttaaaaggaaatatcttcacataaaagctagacagaagctttctgagaaacttctttgtgatatgtgcgttcatctcaccgggttgaatctttcctttcatcgagcaatattgaaacacccttttttttgaatctgaaatagatatttggagcgattgtgtcctatggtagtaaaggcaatattttcacagaaaaactagacagaagcattctgcaaaacttcctcgtgatgtgttcatttatctcaccaaattgaaccattcttttccttgagcagatttgatacactctttttgtagaatgtgcacgtgaatatttggaacgctttgatgagtttgacggaaaaggaaataccttcacatataaacgagacagaagcattctgagaaacttctttctgatatgtgcattcaactcacagagttgaacctttcttttgattcagcagttttgaaacacactttttgaaggatctgtaagtggatatttggagtgcttaggggtcgatgctagaaaggaaatatctccacataaaaacttgatggaagcattctgagaaacttctttgtgatgtgtgcattcatcagagagagtttaacatttcttttgactgagcagttttgaaactctctttttgtagaatctgcaagtggacatttggagccacttgaggcctattgtggaaaagggaataaattcacataaaagctacacggaagcattctgacaaacttctttgtgatgtgcacattcatctcacagattgaaaatttcttttgattgagcagttttgaaatgctcttttcggagaatcagccagtggatatttggagcactttgaggactatggtggaaaaggaaatatcttcacataaaaactagaggaaacattctgagaaacttatttgtgatgtgtgcattcctctcacagagttgaacatttcttttgattaagcagttttgaaacactcttttgtggaatctgctagaggatatttggagcgctttgaggcctatggaggaaaaggaaatatcttcacttaaaaactagacagaagcattctgagaaacttctttgtgatgtttgcattcatctcacagggttgaaattttcttttgattgagaagttttgagacactctttttgtagaatctgcctgtggataataggagcgctttggggcatattttggaaaaggaaataccttcacataaatagtagacagaagcattctgagaaacttctttgtgacgtgtgcatatatatcacagagttgaacctttcttttcatttagccttttgaaacactctttttctagaatctgcaagtgaatatttggagcgctttgcggcctatggtggaaaataaatatcttcacataaaaactagacagaagcaatctgagaaactactttgtgatgtgtgcattcatctcacagagttgaacctttcttttgattgagcagttttgaaacactctttttgttgtatatgcaagtggatatttggagcgatttgtggtctatggtggaaaaggaaatatcttcacgtaaaaactagacagaagcactctgagaaacttctttgtgatgtgtgcattcatctcaccaagcggaaccattcttttgatggagctgttttgaaatactctttttgtagaatctgcaagtgaatatttggagtgctttcaggcctgtggtggaaaaggaaatatcttcacataaaaactagacagaagcattcggagaaacttctttttagtgtgtgcattcatctcacagtgttgaaactttcttttgattgagggttttgaaacagtctttttgataaatctgcaagtggatatttggagcgaattgtggcctatggtttaaaaggaaatatcttcacataaaagctagacagaagctttctgagaaacttctttgtgatatgtgcgttcatctcaccgggttgaatctttcctttcatcgagcaatattgaaacacccttttttttgaatctgaaatagatatttggagcgattgtgtcctatggtagtaaaggcaatattttcacagaaaaactagacagaagcattctgcaaaacttcctcgtgatgtgttcatttatctcaccaaattgaaccattcttttccttgagcagatttgatacactctttttgtagaatgtgcaagtgaatatttggaacgctttgatgagtttgacggaaaaggaaataccttcacatataaacgagacagaagcattctgagaaacttctttctgatatgtgcattcaactcacagagttgaacctttcttttgattcagcagttttgaaacacactttttgaaggatctgtaagtggatatttggagtgcttaggggtcgatgctagaaaggaaatatctccacataaaaacttgatggaagcattctgagaaacttctttgtgatgtgtgcattcatcagagagagtttaacatttcttttgactgagcagttttgaaactctctttttgtagaatctgcaagtggacatttggagccacttgaggcctattgtggaaaagggaataaattcacataaaagctacacggaagcattctgacaaacttctttgtgatgtgcacattcatctcacagattgaaaatttcttttgattgagcagttttgaaatgctcttttcggagaatcagccagtggatatttggagcactttgaggactatggtggaaaaggaaatatcttcacataaaaactagaggaaacattctgagaaacttatttgtgatgtgtgcattcctctcacagagttgaacatttcttttgattaagcagttttgaaacactcttttgtggaatctgctagaggatatttggagcgctttgaggcctatggaggaaaaggaaatatcttcacttaaaaactagacagaagcattctgagaaacttctttgtgatgtttgcattcatctcacagggttgaaattttcttttgattgagaagttttgagacactctttttgtagaatctgcctgtggataataggagcgctttggggcatattttggaaaaggaaataccttcacataaatagtagacagaagcattctgagaaacttctttgtgacgtgtgcatatatatcacagagttgaacctttcttttcatttagccttttgaaacactctttttctagaatctgcaagtgaatatttggagcgctttgcggcctatggtggaaaataaatatcttcacataaaaactagacagaagcaatctgagaaactactttgtgatgtgtgcattcatctcacagagttgaacctttcttttgattgagcagttttgaaacactctttttgttgtatatgcaagtggatatttggagcgatttgtggtctatggtggaaaaggaaatatcttcacgtaaaaactagacagaagcactctgagaaacttctttgtgatgtgtgcattcatctcaccaagcggaaccattcttttgatggagctgttttgaaatactctttttgtagaatctgcaagtgaatatttggagtgctttcaggcctgtggtggaaaaggaaatatcttcacataaaaactagacagaagcattcggagaaacttctttttagtgtgtgcattcatctcacagtgttgaaactttcttttgattgagggttttgaaacagtctttttgataaatctgcaagtggatatttggagcgaattgtggcctatggtttaaaaggaaatatcttcacataaaagctagacagaagctttctgagaaacttctttgtgatatgtgcgttcatctcaccgggttgaatctttcctttcatcgagcaatattgaaacacccttttttttgaatctgaaatagatatttggagcgattgtgtcctatggtagtaaaggcaatattttcacagaaaaactagacagaagcattctgcaaaacttcctcgtgatgtgttcatttatctcaccaaattgaaccattcttttccttgagcagatttgatacactctttttgtagaatgtgcaagtgaatatttggaacgctttgatgagtttgacggaaaaggaaataccttcacatataaacgagacagaagcattctgagaaacttctttctgatatgtgcattcaactcacagagttgaacctttcttttgattcagcagttttgaaacacactttttgaaggatctgtaagtggatatttggagtgcttaggggtcgatgctagaaaggaaatatctccacataaaaacttgatggaagcattctgagaaacttctttgtgatgtgtgcattcatcagagagagtttaacatttcttttgactgagcagttttgaaactctctttttgtagaatctgcaagtggacatttggagccacttgaggcctattgtggaaaagggaataaattcacataaaagctacacggaagcattctgacaaacttctttgtgatgtgcacattcatctcacagattgaaaatttcttttgattgagcagttttgaaatgctcttttcggagaatcagccagtggatatttggagcactttgaggactatggtggaaaaggaaatatcttcacataaaaactagaggaaacattctgagaaacttatttgtgatgtgtgcattcctctcacagagttgaacatttcttttgattaagcagttttgaaacactcttttgtggaatctgctagaggatatttggagcgctttgaggcctatggaggaaaaggaaatatcttcacttaaaaactagacagaagcattctgagaaacttctttgtgatgtttgcattcatctcacagggttgaaattttcttttgattgagaagttttgagacactctttttgtagaatctgcctgtggataataggagcgctttggggcatattttggaaaaggaaataccttcacataaatagtagacagaagcattctgagaaacttctttgtgacgtgtgcatatatatcacagagttgaacctttcttttcatttagccttttgaaacactctttttctagaatctgcaagtgaatatttggagcgctttgcggcctatggtggaaaataaatatcttcacataaaaactagacagaagcaatctgagaaactactttgtgatgtgtgcattcatctcacagagttgaacctttcttttgattgagcagttttgaaacactctttttgttgtatatgcaagtggatatttggagcgatttgtggtctatggtggaaaaggaaatatcttcacgtaaaaactagacagaagcactctgagaaacttctttgtgatgtgtgcattcatctcaccaagcggaaccattcttttgatggagctgttttgaaatactctttttgtagaatctgcaagtgaatatttggagtgctttcaggcctgtggtggaaaaggaaatatcttcacataaaaactagacagaagcattcggagaaacttctttttagtgtgtgcattcatctcacagtgttgaaactttcttttgattgagggttttgaaacagtctttttgataaatctgcaagtggatatttggagcgaattgtggcctatggtttaaaaggaaatatcttcacataaaagctagacagaagctttctgagaaacttctttgtgatatgtgcgttcatctcaccgggttgaatctttcctttcatcgagcaatattgaaacacccttttttttgaatctgaaatagatatttggagcgattgtgtcctatggtagtaaaggcaatattttcacagaaaaactagacagaagcattctgcaaaacttcctcgtgatgtgttcatttatctcaccaaattgaaccattcttttccttgagcagatttgatacactctttttgtagaatgtgcacgtgaatatttggaacgctttgatgagtttgacggaaaaggaaataccttcacatataaacgagacagaagcattctgagaaacttctttgtgacgtgtgcatatatatcacagagttgaacctttcttttcatttagccttttgaaacactctttttctagaatctgcaagtgaatatttggagcgctttgcggcctatggtggaaaataaatatcttcacataaaaactagacagaagcaatctgagaaactactttgtgatgtgtgcattcatctcacagagttgaacctttcttttgattgagcagttttgaaacactctttttgttgtatatgcaagtggatatttggagcgatttgtggtctatggtggaaaaggaaatatcttcacgtaaaaactagacagaagcactctgagaaacttctttgtgatgtgtgcattcatctcaccaagcggaaccattcttttgatggagctgttttgaaatactctttttgtagaatctgcaagtgaatatttggagtgctttcaggcctgtggtggaaaaggaaatatcttcacataaaaactagacagaagcattcggagaaacttctttttagtgtgtgcattcatctcacagtgttgaaactttcttttgattgagggttttgaaacagtctttttgataaatctgcaagtggatatttggagcgaattgtggcctatggtttaaaaggaaatatcttcacataaaagctagacagaagctttctgagaaacttctttgtgatatgtgcgttcatctcaccgggttgaatctttcctttcatcgagcaatattgaaacacccttttttttgaatctgaaatagatatttggagcgattgtgtcctatggtagtaaaggcaatattttcacagaaaaactagacagaagcattctgcaaaacttcctcgtgatgtgttcatttatctcaccaaattgaaccattcttttccttgagcagatttgatacactctttttgtagaatgtgcaagtgaatatttggaacgctttgatgagtttgacggaaaaggaaataccttcacatataaacgagacagaagcattctgagaaacttctttctgatatgtgcattcaactcacagagttgaacctttcttttgattcagcagttttgaaacacactttttgaaggatctgtaagtggatatttggagtgcttaggggtcgatgctagaaaggaaatatctccacataaaaacttgatggaagcattctgagaaacttctttgtgatgtgtgcattcatcagagagagtttaacatttcttttgactgagcagttttgaaactctctttttgtagaatctgcaagtggacatttggagccacttgaggcctattgtggaaaagggaataaattcacataaaagctacacggaagcattctgacaaacttctttgtgatgtgcacattcatctcacagattgaaaatttcttttgattgagcagttttgaaatgctcttttcggagaatcagccagtggatatttggagcactttgaggactatggtggaaaaggaaatatcttcacataaaaactagaggaaacattctgagaaacttatttgtgatgtgtgcattcctctcacagagttgaacatttcttttgattaagcagttttgaaacactcttttgtggaatctgctagaggatatttggagcgctttgaggcctatggaggaaaaggaaatatcttcacttaaaaactagacagaagcattctgagaaacttctttgtgatgtttgcattcatctcacagggttgaaattttcttttgattgagaagttttgagacactctttttgtagaatctgcctgtggataataggagcgctttggggcatattttggaaaaggaaataccttcacataaatagtagacagaagcattctgagaaacttctttgtgacgtgtgcatatatatcacagagttgaacctttcttttcatttagccttttgaaacactctttttctagaatctgcaagtgaatatttggagcgctttgcggcctatggtggaaaataaatatcttcacataaaaactagacagaagcaatctgagaaactactttgtgatgtgtgcattcatctcacagagttgaacctttcttttgattgagcagttttgaaacactctttttgttgtatatgcaagtggatatttggagcgatttgtggtctatggtggaaaaggaaatatcttcacgtaaaaactagacagaagcactctgagaaacttccttgtgatgtgtgcattcatctcaccaagcggaaccattcttttgatggagctgttttgaaatactctttttgtagaatctgcaagtgaatatttggagtgctttcaggcctgtggtggaaaaggaaatatcttcacataaaaactagacagaagcattcggagaaacttctttttagtgtgtgcattcatctcacagtgttgaaactttcttttgattgagggttttgaaacagtctttttgataaatctgcaagtggatatttggagcgaattgtggcctatggtttaaaaggaaatatcttcacataaaagctagacagaagctttctgagaaacttctttgtgatatgtgcgttcatctcaccgggttgaatctttcctttcatcgagcaatattgaaacacccttttttttgaatctgaaatagatatttggagcgattgtgtcctatggtagtaaaggcaatattttcacagaaaaactagacagaagcattctgcaaaacttcctcgtgatgtgttcatttatctcaccaaattgaaccattcttttccttgagcagatttgatacactctttttgtagaatgtgcaagtgaatatttggaacgctttgatgagtttgacggaaaaggaaataccttcacatataaacgagacagaagcattctgagaaacttctttctgatatgtgcattcaactcacagagttgaacctttcttttgattcagcagttttgaaacacactttttgaaggatctgtaagtggatatttggagtgcttaggggtcgatgctagaaaggaaatatctccacataaaaacttgatggaagcattctgagaaacttctttgtgatgtgtgcattcatcagagagagtttaacatttcttttgactgagcagttttgaaactctctttttgtagaatctgcaagtggacatttggagccacttgaggcctattgtggaaaagggaataaattcacataaaagctacacggaagcattctgacaaacttctttgtgatgtgcacattcatctcacagattgaaaatttcttttgattgagcagttttgaaatgctcttttcggagaatcagccagtggatatttggagcactttgaggactatggtggaaaaggaaatatcttcacataaaaactagaggaaacattctgagaaacttatttgtgatgtgtgcattcctctcacagagttgaacatttcttttgattaagcagttttgaaacactcttttgtggaatctgctagaggatatttggagtgctttgaggcctatggaggaaaaggaaatatcttcacttaaaaactagacagaagcattctgagaaacttctttgtgatgtttgcattcatctcacagggttgaaattttcttttgattgagaagttttgagacactctttttgtagaatctgcctgtggataataggagcgctttggggcatattttggaaaaggaaataccttcacataaatagtagacagaagcattctgagaaacttctttgtgacgtgtgcatatatatcacagagttgaacctttcttttcatttagccttttgaaacactctttttctagaatctgcaagtgaatatttggagcgctttgcggcctatggtggaaaataaatatcttcacataaaaactagacagaagcaatctgagaaactactttgtgatgtgtgcattcatctcacagagttgaacctttcttttgattgagcagttttgaaacactctttttgttgtatatgcaagtggatatttggagcgatttgtggtctatggtggaaaaggaaatatcttcacgtaaaaactagacagaagcactctgagaaacttccttgtgatgtgtgcattcatctcaccaagcggaaccattcttttgatggagctgttttgaaatactctttttgtagaatctgcaagtgaatatttggagtgctttcaggcctgtggtggaaaaggaaatatcttcacataaaaactagacagaagcattcggagaaacttctttttagtgtgtgcattcatctcacagtgttgaaactttcttttgattgagggttttgaaacagtctttttgataaatctgcaagtggatatttggagcgaattgtggcctatggtttaaaaggaaatatcttcacataaaagctagacagaagctttctgagaaacttctttgtgatatgtgcgttcatctcaccgggttgaatctttcctttcatcgagcaatattgaaacacccttttttttgaatctgaaatagatatttggagcgattgtgtcctatggtagtaaaggcaatattttcacagaaaaactagacagaagcattctgcaaaacttcctcgtgatgtgttcatttatctcaccaaattgaaccattcttttccttgagcagatttgatacactctttttgtagaatgtgcaagtgaatatttggaacgctttgatgagtttgacggaaaaggaaataccttcacatataaacgagacagaagcattctgagaaacttctttctgatatgtgcattcaactcacagagttgaacctttcttttgattcagcagttttgaaacacactttttgaaggatctgtaagtggatatttggagtgcttaggggtcgatgctagaaaggaaatatctccacataaaaacttgatggaagcattctgagaaacttctttgtgatgtgtgcattcatcagagagagtttaacatttcttttgactgagcagttttgaaactctctttttgtagaatctgcaagtggacatttggagccacttgaggcctattgtggaaaagggaataaattcacataaaagctacacggaagcattctgacaaacttctttgtgatgtgcacattcatctcacagattgaaaatttcttttgattgagcagttttgaaatgctcttttcggagaatcagccagtggatatttggagcactttgaggactatggtggaaaaggaaatatcttcacataaaaactagaggaaacattctgagaaacttatttgtgatgtgtgcattcctctcacagagttgaacatttcttttgattaagcagttttgaaacactcttttgtggaatctgctagaggatatttggagcgctttgaggcctatggaggaaaaggaaatatcttcacttaaaaactagacagaagcattctgagaaacttctttgtgatgtttgcattcatctcacagggttgaaattttcttttgattgagaagttttgagacactctttttgtagaatctgcctgtggataataggagcgctttggggcatattttggaaaaggaaataccttcacataaatagtagacagaagcattctgagaaacttctttgtgacgtgtgcatatatatcacagagttgaacctttcttttcatttagccttttgaaacactctttttctagaatctgcaagtgaatatttggagcgctttgcggcctatggtggaaaataaatatcttcacataaaaactagacagaagcaatctgagaaactactttgtgatgtgtgcattcatctcacagagttgaacctttcttttgattgagcagttttgaaacactctttttgttgtatatgcaagtggatatttggagcgatttgtggtctatggtggaaaaggaaatatcttcacgtaaaaactagacagaagcactctgagaaacttctttgtgatgtgtgcattcatctcaccaagcggaaccattcttttgatggagctgttttgaaatactctttttgtagaatctgcaagtgaatatttggagtgctttcaggcctgtggtggaaaaggaaatatcttcacataaaaactagacagaagcattcggagaaacttctttttagtgtgtgcattcatctcacagtgttgaaactttcttttgattgagggttttgaaacagtctttttgataaatctgcaagtggatatttggagcgaattgtggcctatggtttaaaaggaaatatcttcacataaaagctagacagaagctttctgagaaacttctttgtgatatgtgcgttcatctcaccgggttgaatctttcctttcatcgagcaatattgaaacacccttttttttgaatctgaaatagatatttggagcgattgtgtcctatggtagtaaaggcaatattttcacagaaaaactagacagaagcattctgcaaaacttcctcgtgatgtgttcatttatctcaccaaattgaaccattcttttccttgagcagatttgatacactctttttgtagaatgtgcaagtgaatatttggaacgctttgatgagtttgacggaaaaggaaataccttcacatataaacgagacagaagcattctgagaaacttctttctgatatgtgcattcaactcacagagttgaacctttcttttgattcagcagttttgaaacacactttttgaaggatctgtaagtggatatttggagtgcttaggggtcgatgctagaaaggaaatatctccacataaaaacttgatggaagcattctgagaaacttctttgtgatgtgtgcattcatcagagagagtttaacatttcttttgactgagcagttttgaaactctctttttgtagaatctgcaagtggacatttggagccacttgaggcctattgtggaaaagggaataaattcacataaaagctacacggaagcattctgacaaacttctttgtgatgtgcacattcatctcacagattgaaaatttcttttgattgagcagttttgaaatgctcttttcggagaatcagccagtggatatttggagcactttgaggactatggtggaaaaggaaatatcttcacataaaaactagaggaaacattctgagaaacttatttgtgatgtgtgcattcctctcacagagttgaacatttcttttgattaagcagttttgaaacactcttttgtggaatctgctagaggatatttggagcgctttgaggcctatggaggaaaaggaaatatcttcacttaaaaactagacagaagcattctgagaaacttctttgtgatgtttgcattcatctcacagggttgaaattttcttttgattgagaagttttgagacactctttttgtagaatctgcctgtggataataggagcgctttggggcatattttggaaaaggaaataccttcacataaatagtagacagaagcattctgagaaacttctttgtgacgtgtgcatatatatcacagagttgaacctttcttttcatttagccttttgaaacactctttttctagaatctgcaagtgaatatttggagcgctttgcggcctatggtggaaaataaatatcttcacataaaaactagacagaagcaatctgagaaactactttgtgatgtgtgcattcatctcacagagttgaacctttcttttgattgagcagttttgaaacactctttttgttgtatatgcgagtggatatttggagcgatttgtggtctatggtggaaaaggaaatatcttcacgtaaaaactagacagaagcactctgagaaacttctttgtgatgtgtgcattcatctcaccaagcggaaccattcttttgatggagctgttttgaaatactctttttgtagaatctgcaagtgaatatttggagtgctttcaggcctgtggtggaaaaggaaatatcttcacataaaaactagacagaagcattcggagaaacttctttttagtgtgtgcattcatctcacagtgttgaaactttcttttgattgagggttttgaaacagtctttttgataaatctgcaagtggatatttggagcgaattgtggcctatggtttaaaaggaaatatcttcacataaaagctagacagaagctttctgagaaacttctttgtgatatgtgcgttcatctcaccgggttgaatctttcctttcatcgagcaatattgaaacacccttttttttgaatctgaaatagatatttggagcgattgtgtcctatggtagtaaaggcaatattttcacagaaaaactagacagaagcattctgcaaaacttcctcgtgatgtgttcatttatctcaccaaattgaaccattcttttccttgagcagatttgatacactctttttgtagaatgtgcaagtgaatatttggaacgctttgatgagtttgacggaaaaggaaataccttcacatataaacgagacagaagcattctgagaaacttctttctgatatgtgcattcaactcacagagttgaacctttcttttgattcagcagttttgaaacacactttttgaaggatctgtaagtggatatttggagtgcttaggggtcgatgctagaaaggaaatatctccacataaaaacttgatggaagcattctgagaaacttctttgtgatgtgtgcattcatcagagagagtttaacatttcttttgactgagcagttttgaaactctctttttgtagaatctgcaagtggacatttggagccacttgaggcctattgtggaaaagggaataaattcacataaaagctacacggaagcattctgacaaacttctttgtgatgtgcacattcatctcacagattgaaaatttcttttgattgagcagttttgaaatgctcttttcggagaatcagccagtggatatttggagcactttgaggactatggtggaaaaggaaatatcttcacataaaaactagaggaaacattctgagaaacttatttgtgatgtgtgcattcctctcacagagttgaacatttcttttgattaagcagttttgaaacactcttttgtggaatctgctagaggatatttggagcgctttgaggcctatggaggaaaaggaaatatcttcacttaaaaactagacagaagcattctgagaaacttctttgtgatgtttgcattcatctcacagggttgaaattttcttttgattgagaagttttgagacactctttttgtagaatctgcctgtggataataggagcgctttggggcatattttggaaaaggaaataccttcacataaatagtagacagaagcattctgagaaacttctttgtgacgtgtgcatatatatcacagagttgaacctttcttttcatttagccttttgaaacactctttttctagaatctgcaagtgaatatttggagcgctttgcggcctatggtggaaaataaatatcttcacataaaaactagacagaagcaatctgagaaactactttgtgatgtgtgcattcatctcacagagttgaacctttcttttgattgagcagttttgaaacactctttttgttgtatatgcaagtggatatttggagcgatttgtggtctatggtggaaaaggaaatatcttcacgtaaaaactagacagaagcactctgagaaacttctttgtgatgtgtgcattcatctcaccaagcggaaccattcttttgatggagctgttttgaaatactctttttgtagaatctgcaagtgaatatttggagtgctttcaggcctgtggtggaaaaggaaatatcttcacataaaaactagacagaagcattcggagaaacttctttttagtgtgtgcattcatctcacagtgttgaaactttcttttgattgagggttttgaaacagtctttttgataaatctgcaagtggatatttggagcgaattgtggcctatggtttaaaaggaaatatcttcacataaaagctagacagaagctttctgagaaacttctttgtgatatgtgcgttcatctcaccgggttgaatctttcctttcatcgagcaatattgaaacacccttttttttgaatctgaaatagatatttggagcgattgtgtcctatggtagtaaaggcaatattttcacagaaaaactagacagaagcattctgcaaaacttcctcgtgatgtgttcatttatctcaccaaattgaaccattcttttccttgagcagatttgatacactctttttgtagaatgtgcaagtgaatatttggaacgctttgatgagtttgacggaaaaggaaataccttcacatataaacgagacagaagcattctgagaaacttctttctgatatgtgcattcaactcacagagttgaacctttcttttgattcagcagttttgaaacacactttttgaaggatctgtaagtggatatttggagtgcttaggggtcgatgctagaaaggaaatatctccacataaaaacttgatggaagcattctgagaaacttctttgtgatgtgtgcattcatcagagagagtttaacatttcttttgactgagcagttttgaaactctctttttgtagaatctgcaagtggacatttggagccacttgaggcctattgtggaaaagggaataaattcacataaaagctacacggaagcattctgacaaacttctttgtgatgtgcacattcatctcacagattgaaaatttcttttgattgagcagttttgaaatgctcttttcggagaatcagccagtggatatttggagcactttgaggactatggtggaaaaggaaatatcttcacataaaaactagaggaaacattctgagaaacttatttgtgatgtgtgcattcctctcacagagttgaacatttcttttgattaagcagttttgaaacactcttttgtggaatctgctagaggatatttggagcgctttgaggcctatggaggaaaaggaaatatcttcacttaaaaactagacagaagcattctgagaaacttctttgtgatgtttgcattcatctcacagggttgaaattttcttttgattgagaagttttgagacactctttttgtagaatctgcctgtggataataggagcgctttggggcatattttggaaaaggaaataccttcacataaatagtagacagaagcattctgagaaacttctttgtgacgtgtgcatatatatcacagagttgaacctttcttttcatttagccttttgaaacactctttttctagaatctgcaagtgaatatttggagcgctttgcggcctatggtggaaaataaatatcttcacataaaaactagacagaagcaatctgagaaactactttgtgatgtgtgcattcatctcacagagttgaacctttcttttgattgagcagttttgaaacactctttttgttgtatatgcaagtggatatttggagcgatttgtggtctatggtggaaaaggaaatatcttcacgtaaaaactagacagaagcactctgagaaacttctttgtgatgtgtgcattcatctcaccaagcggaaccattcttttgatggagctgttttgaaatactctttttgtagaatctgcaagtgaatatttggagtgctttcaggcctgtggtggaaaaggaaatatcttcacataaaaactagacagaagcattcggagaaacttctttttagtgtgtgcattcatctcacagtgttgaaactttcttttgattgagggttttgaaacagtctttttgataaatctgcaagtggatatttggagcgaattgtggcctatggtttaaaaggaaatatcttcacataaaagctagacagaagctttctgagaaacttctttgtgatatgtgcgttcatctcaccgggttgaatctttcctttcatcgagcaatattgaaacacccttttttttgaatctgaaatagatatttggagcgattgtgtcctatggtagtaaaggcaatattttcacagaaaaactagacagaagcattctgcaaaacttcctcgtgatgtgttcatttatctcaccaaattgaaccattcttttccttgagcagatttgatacactctttttgtagaatgtgcaagtgaatatttggaacgctttgatgagtttgacggaaaaggaaataccttcacatataaacgagacagaagcattctgagaaacttctttctgatatgtgcattcaactcacagagttgaacctttcttttgattcagcagttttgaaacacactttttgaaggatctgtaagtggatatttggagtgcttaggggtcgatgctagaaaggaaatatctccacataaaaacttgatggaagcattctgagaaacttctttgtgatgtgtgcattcatcagagagagtttaacatttcttttgactgagcagttttgaaactctctttttgtagaatctgcaagtggacatttggagccacttgaggcctattgtggaaaagggaataaattcacataaaagctacacggaagcattctgacaaacttctttgtgatgtgcacattcatctcacagattgaaaatttcttttgattgagcagttttgaaatgctcttttcggagaatcagccagtggatatttggagcactttgaggactatggtggaaaaggaaatatcttcacataaaaactagaggaaacattctgagaaacttatttgtgatgtgtgcattcctctcacagagttgaacatttcttttgattaagcagttttgaaacactcttttgtggaatctgctagaggatatttggagcgctttgaggcctatggaggaaaaggaaatatcttcacttaaaaactagacagaagcattctgagaaacttctttgtgatgtttgcattcatctcacagggttgaaattttcttttgattgagaagttttgagacactctttttgtagaatctgcctgtggataataggagcgctttggggcatattttggaaaaggaaataccttcacataaatagtagacagaagcattctgagaaacttctttgtgacgtgtgcatatatatcacagagttgaacctttcttttcatttagccttttgaaacactctttttctagaatctgcaagtgaatatttggagcgctttgcggcctatggtggaaaataaatatcttcacataaaaactagacagaagcaatctgagaaactactttgtgatgtgtgcattcatctcacagagttgaacctttcttttgattgagcagttttgaaacactctttttgttgtatatgcaagtggatatttggagcgatttgtggtctatggtggaaaaggaaatatcttcacgtaaaaactagacagaagcactctgagaaacttctttgtgatgtgtgcattcatctcaccaagcggaaccattcttttgatggagctgttttgaaatactctttttgtagaatctgcaagtgaatatttggagtgctttcaggcctgtggtggaaaaggaaatatcttcacataaaaactagacagaagcattcggagaaacttctttttagtgtgtgcattcatctcacagtgttgaaactttcttttgattgagggttttgaaacagtctttttgataaatctgcaagtggatatttggagcgaattgtggcctatggtttaaaaggaaatatcttcacataaaagctagacagaagctttctgagaaacttctttgtgatatgtgcgttcatctcaccgggttgaatctttcctttcatcgagcaatattgaaacacccttttttttgaatctgaaatagatatttggagcgattgtgtcctatggtagtaaaggcaatattttcacagaaaaactagacagaagcattctgcaaaacttcctcgtgatgtgttcatttatctcaccaaattgaaccattcttttccttgagcagatttgatacactctttttgtagaatgtgcaagtgaatatttggaacgctttgatgagtttgacggaaaaggaaataccttcacatataaacgagacagaagcattctgagaaacttctttctgatatgtgcattcaactcacagagttgaacctttcttttgattcagcagttttgaaacacactttttgaaggatctgtaagtggatatttggagtgcttaggggtcgatgctagaaaggaaatatctccacataaaaacttgatggaagcattctgagaaacttctttgtgatgtgtgcattcatcagagagagtttaacatttcttttgactgagcagttttgaaactctctttttgtagaatctgcaagtggacatttggagccacttgaggcctattgtggaaaagggaataaattcacataaaagctacacggaagcattctgacaaacttctttgtgatgtgcacattcatctcacagattgaaaatttcttttgattgagcagttttgaaatgctcttttcggagaatcagccagtggatatttggagcactttgaggactatggtggaaaaggaaatatcttcacataaaaactagaggaaacattctgagaaacttatttgtgatgtgtgcattcctctcacagagttgaacatttcttttgattaagcagttttgaaacactcttttgtggaatctgctagaggatatttggagcgctttgaggcctatggaggaaaaggaaatatcttcacttaaaaactagacagaagcattctgagaaacttctttgtgatgtttgcattcatctcacagggttgaaattttcttttgattgagaagttttgagacactctttttgtagaatctgcctgtggataataggagcgctttggggcatattttggaaaaggaaataccttcacataaatagtagacagaagcattctgagaaacttctttgtgacgtgtgcatatatatcacagagttgaacctttcttttcatttagccttttgaaacactctttttctagaatctgcaagtgaatatttggagcgctttgcggcctatggtggaaaataaatatcttcacataaaaactagacagaagcaatctgagaaactactttgtgatgtgtgcattcatctcacagagttgaacctttcttttgattgagcagttttgaaacactctttttgttgtatatgcgagtggatatttggagcgatttgtggtctatggtggaaaaggaaatatcttcacgtaaaaactagacagaagcactctgagaaacttccttgtgatgtgtgcattcatctcaccaagcggaaccattcttttgatggagctgttttgaaatactctttttgtagaatctgcaagtgaatatttggagtgctttcaggcctgtggtggaaaaggaaatatcttcacataaaaactagacagaagcattcggagaaacttctttttagtgtgtgcattcatctcacagtgttgaaactttcttttgattgagggttttgaaacagtctttttgataaatctgcaagtggatatttggagcgaattgtggcctatggtttaaaaggaaatatcttcacataaaagctagacagaagctttctgagaaacttctttgtgatatgtgcgttcatctcaccgggttgaatctttcctttcatcgagcaatattgaaacacccttttttttgaatctgaaatagatatttggagcgattgtgtcctatggtagtaaaggcaatattttcacagaaaaactagacagaagcattctgcaaaacttcctcgtgatgtgttcatttatctcaccaaattgaaccattcttttccttgagcagatttgatacactctttttgtagaatgtgcaagtgaatatttggaacgctttgatgagtttgacggaaaaggaaataccttcacatataaacgagacagaagcattctgagaaacttctttctgatatgtgcattcaactcacagagttgaacctttcttttgattcagcagttttgaaacacactttttgaaggatctgtaagtggatatttggagtgcttaggggtcgatgctagaaaggaaatatctccacataaaaacttgatggaagcattctgagaaacttctttgtgatgtgtgcattcatcagagagagtttaacatttcttttgactgagcagttttgaaactctctttttgtagaatctgcaagtggacatttggagccacttgaggcctattgtggaaaagggaataaattcacataaaagctacacggaagcattctgacaaacttctttgtgatgtgcacattcatctcacagattgaaaatttcttttgattgagcagttttgaaatgctcttttcggagaatcagccagtggatatttggagcactttgaggactatggtggaaaaggaaatatcttcacataaaaactagaggaaacattctgagaaacttatttgtgatgtgtgcattcctctcacagagttgaacatttcttttgattaagcagttttgaaacactcttttgtggaatctgctagaggatatttggagcgctttgaggcctatggaggaaaaggaaatatcttcacttaaaaactagacagaagcattctgagaaacttctttgtgatgtttgcattcatctcacagggttgaaattttcttttgattgagaagttttgagacactctttttgtagaatctgcctgtggataataggagcgctttggggcatattttggaaaaggaaataccttcacataaatagtagacagaagcattctgagaaacttctttgtgacgtgtgcatatatatcacagagttgaacctttcttttcatttagccttttgaaacactctttttctagaatctgcaagtgaatatttggagcgctttgcggcctatggtggaaaataaatatcttcacataaaaactagacagaagcaatctgagaaactactttgtgatgtgtgcattcatctcacagagttgaacctttcttttgattgagcagttttgaaacactctttttgttgtatatgcaagtggatatttggagcgatttgtggtctatggtggaaaaggaaatatcttcacgtaaaaactagacagaagcactctgagaaacttctttgtgatgtgtgcattcatctcaccaagcggaaccattcttttgatggagctgttttgaaatactctttttgtagaatctgcaagtgaatatttggagtgctttcaggcctgtggtggaaaaggaaatatcttcacataaaaactagacagaagcattcggagaaacttctttttagtgtgtgcattcatctcacagtgttgaaactttcttttgattgagggttttgaaacagtctttttgataaatctgcaagtggatatttggagcgaattgtggcctatggtttaaaaggaaatatcttcacataaaagctagacagaagctttctgagaaacttctttgtgatatgtgcgttcatctcaccgggttgaatctttcctttcatcgagcaatattgaaacacccttttttttgaatctgaaatagatatttggagcgattgtgtcctatggtagtaaaggcaatattttcacagaaaaactagacagaagcattctgcaaaacttcctcgtgatgtgttcatttatctcaccaaattgaaccattcttttccttgagcagatttgatacactctttttgtagaatgtgcaagtgaatatttggaacgctttgatgagtttgacggaaaaggaaataccttcacatataaacgagacagaagcattctgagaaacttctttctgatatgtgcattcaactcacagagttgaacctttcttttgattcagcagttttgaaacacactttttgaaggatctgtaagtggatatttggagtgcttaggggtcgatgctagaaaggaaatatctccacataaaaacttgatggaagcattctgagaaacttctttgtgatgtgtgcattcatcagagagagtttaacatttcttttgactgagcagttttgaaactctctttttgtagaatctgcaagtggacatttggagccacttgaggcctattgtggaaaagggaataaattcacataaaagctacacggaagcattctgacaaacttctttgtgatgtgcacattcatctcacagattgaaaatttcttttgattgagcagttttgaaatgctcttttcggagaatcagccagtggatatttggagcactttgaggactatggtggaaaaggaaatatcttcacataaaaactagaggaaacattctgagaaacttatttgtgatgtgtgcattcctctcacagagttgaacatttcttttgattaagcagttttgaaacactcttttgtggaatctgctagaggatatttggagcgctttgaggcctatggaggaaaaggaaatatcttcacttaaaaactagacagaagcattctgagaaacttctttgtgatgtttgcattcatctcacagggttgaaattttcttttgattgagaagttttgagacactctttttgtagaatctgcctgtggataataggagcgctttggggcatattttggaaaaggaaataccttcacataaatagtagacagaagcattctgagaaacttctttgtgacgtgtgcatatatatcacagagttgaacctttcttttcatttagccttttgaaacactctttttctagaatctgcaagtgaatatttggagcgctttgcggcctatggtggaaaataaatatcttcacataaaaactagacagaagcaatctgagaaactactttgtgatgtgtgcattcatctcacagagttgaacctttcttttgattgagcagttttgaaacactctttttgttgtatatgcaagtggatatttggagcgatttgtggtctatggtggaaaaggaaatatcttcacgtaaaaactagacagaagcactctgagaaacttccttgtgatgtgtgcattcatctcaccaagcggaaccattcttttgatggagctgttttgaaatactctttttgtagaatctgcaagtgaatatttggagtgctttcaggcctgtggtggaaaaggaaatatcttcacataaaaactagacagaagcattcggagaaacttctttttagtgtgtgcattcatctcacagtgttgaaactttcttttgattgagggttttgaaacagtctttttgataaatctgcaagtggatatttggagcgaattgtggcctatggtttaaaaggaaatatcttcacataaaagctagacagaagctttctgagaaacttctttgtgatatgtgcgttcatctcaccgggttgaatctttcctttcatcgagcaatattgaaacacccttttttttgaatctgaaatagatatttggagcgattgtgtcctatggtagtaaaggcaatattttcacagaaaaactagacagaagcattctgcaaaacttcctcgtgatgtgttcatttatctcaccaaattgaaccattcttttccttgagcagatttgatacactctttttgtagaatgtgcaagtgaatatttggaacgctttgatgagtttgacggaaaaggaaataccttcacatataaacgagacagaagcattctgagaaacttctttctgatatgtgcattcaactcacagagttgaacctttcttttgattcagcagttttgaaacacactttttgaaggatctgtaagtggatatttggagtgcttaggggtcgatgctagaaaggaaatatctccacataaaaacttgatggaagcattctgagaaacttctttgtgatgtgtgcattcatcagagagagtttaacatttcttttgactgagcagttttgaaactctctttttgtagaatctgcaagtggacatttggagccacttgaggcctattgtggaaaagggaataaattcacataaaagctacacggaagcattctgacaaacttctttgtgatgtgcacattcatctcacagattgaaaatttcttttgattgagcagttttgaaatgctcttttcggagaatcagccagtggatatttggagcactttgaggactatggtggaaaaggaaatatcttcacataaaaactagaggaaacattctgagaaacttatttgtgatgtgtgcattcctctcacagagttgaacatttcttttgattaagcagttttgaaacactcttttgtggaatctgctagaggatatttggagcgctttgaggcctatggaggaaaaggaaatatcttcacttaaaaactagacagaagcattctgagaaacttctttgtgatgtttgcattcatctcacagggttgaaattttcttttgattgagaagttttgagacactctttttgtagaatctgcctgtggataataggagcgctttggggcatattttggaaaaggaaataccttcacataaatagtagacagaagcattctgagaaacttctttgtgacgtgtgcatatatatcacagagttgaacctttcttttcatttagccttttgaaacactctttttctagaatctgcaagtgaatatttggagcgctttgcggcctatggtggaaaataaatatcttcacataaaaactagacagaagcaatctgagaaactactttgtgatgtgtgcattcatctcacagagttgaacctttcttttgattgagcagttttgaaacactctttttgttgtatatgcaagtggatatttggagcgatttgtggtctatggtggaaaaggaaatatcttcacgtaaaaactagacagaagcactctgagaaacttctttgtgatgtgtgcattcatctcaccaagcggaaccattcttttgatggagctgttttgaaatactctttttgtagaatctgcaagtgaatatttggagtgctttcaggcctgtggtggaaaaggaaatatcttcacataaaaactagacagaagcattcggagaaacttctttttagtgtgtgcattcatctcacagtgttgaaactttcttttgattgagggttttgaaacagtctttttgataaatctgcaagtggatatttggagcgaattgtggcctatggtttaaaaggaaatatcttcacataaaagctagacagaagctttctgagaaacttctttgtgatatgtgcgttcatctcaccgggttgaatctttcctttcatcgagcaatattgaaacacccttttttttgaatctgaaatagatatttggagcgattgtgtcctatggtagtaaaggcaatattttcacagaaaaactagacagaagcattctgcaaaacttcctcgtgatgtgttcatttatctcaccaaattgaaccattcttttccttgagcagatttgatacactctttttgtagaatgtgcaagtgaatatttggaacgctttgatgagtttgacggaaaaggaaataccttcacatataaacgagacagaagcattctgagaaacttctttctgatatgtgcattcaactcacagagttgaacctttcttttgattcagcagttttgaaacacactttttgaaggatctgtaagtggatatttggagtgcttaggggtcgatgctagaaaggaaatatctccacataaaaacttgatggaagcattctgagaaacttctttgtgatgtgtgcattcatcagagagagtttaacatttcttttgactgagcagttttgaaactctctttttgtagaatctgcaagtggacatttggagccacttgaggcctattgtggaaaagggaataaattcacataaaagctacacggaagcattctgacaaacttctttgtgatgtgcacattcatctcacagattgaaaatttcttttgattgagcagttttgaaatgctcttttcggagaatcagccagtggatatttggagcactttgaggactatggtggaaaaggaaatatcttcacataaaaactagaggaaacattctgagaaacttatttgtgatgtgtgcattcctctcacagagttgaacatttcttttgattaagcagttttgaaacactcttttgtggaatctgctagaggatatttggagcgctttgaggcctatggaggaaaaggaaatatcttcacttaaaaactagacagaagcattctgagaaacttctttgtgatgtttgcattcatctcacagggttgaaattttcttttgattgagaagttttgagacactctttttgtagaatctgcctgtggataataggagcgctttggggcatattttggaaaaggaaataccttcacataaatagtagacagaagcattctgagaaacttctttgtgacgtgtgcatatatatcacagagttgaacctttcttttcatttagccttttgaaacactctttttctagaatctgcaagtgaatatttggagcgctttgcggcctatggtggaaaataaatatcttcacataaaaactagacagaagcaatctgagaaactactttgtgatgtgtgcattcatctcacagagttgaacctttcttttgattgagcagttttgaaacactctttttgttgtatatgcaagtggatatttggagcgatttgtggtctatggtggaaaaggaaatatcttcacgtaaaaactagacagaagcactctgagaaacttctttgtgatgtgtgcattcatctcaccaagcggaaccattcttttgatggagctgttttgaaatactctttttgtagaatctgcaagtgaatatttggagtgctttcaggcctgtggtggaaaaggaaatatcttcacataaaaactagacagaagcattcggagaaacttctttttagtgtgtgcattcatctcacagtgttgaaactttcttttgattgagggttttgaaacagtctttttgataaatctgcaagtggatatttggagcgaattgtggcctatggtttaaaaggaaatatcttcacataaaagctagacagaagctttctgagaaacttctttgtgatatgtgcgttcatctcaccgggttgaatctttcctttcatcgagcaatattgaaacacccttttttttgaatctgaaatagatatttggagcgattgtgtcctatggtagtaaaggcaatattttcacagaaaaactagacagaagcattctgcaaaacttcctcgtgatgtgttcatttatctcaccaaattgaaccattcttttccttgagcagatttgatacactctttttgtagaatgtgcaagtgaatatttggaacgctttgatgagtttgacggaaaaggaaataccttcacatataaacgagacagaagcattctgagaaacttctttctgatatgtgcattcaactcacagagttgaacctttcttttgattcagcagttttgaaacacactttttgaaggatctgtaagtggatatttggagtgcttaggggtcgatgctagaaaggaaatatctccacataaaaacttgatggaagcattctgagaaacttctttgtgatgtgtgcattcatcagagagagtttaacatttcttttgactgagcagttttgaaactctctttttgtagaatctgcaagtggacatttggagccacttgaggcctattgtggaaaagggaataaattcacataaaagctacacggaagcattctgacaaacttctttgtgatgtgcacattcatctcacagattgaaaatttcttttgattgagcagttttgaaatgctcttttcggagaatcagccagtggatatttggagcactttgaggactatggtggaaaaggaaatatcttcacataaaaactagaggaaacattctgagaaacttatttgtgatgtgtgcattcctctcacagagttgaacatttcttttgattaagcagttttgaaacactcttttgtggaatctgctagaggatatttggagcgctttgaggcctatggaggaaaaggaaatatcttcacttaaaaactagacagaagcattctgagaaacttctttgtgatgtttgcattcatctcacagggttgaaattttcttttgattgagaagttttgagacactctttttgtagaatctgcctgtggataataggagcgctttggggcatattttggaaaaggaaataccttcacataaatagtagacagaagcattctgagaaacttctttgtgacgtgtgcatatatatcacagagttgaacctttcttttcatttagccttttgaaacactctttttctagaatctgcaagtgaatatttggagcgctttgcggcctatggtggaaaataaatatcttcacataaaaactagacagaagcaatctgagaaactactttgtgatgtgtgcattcatctcacagagttgaacctttcttttgattgagcagttttgaaacactctttttgttgtatatgcaagtggatatttggagcgatttgtggtctatggtggaaaaggaaatatcttcacgtaaaaactagacagaagcactctgagaaacttccttgtgatgtgtgcattcatctcaccaagcggaaccattcttttgatggagctgttttgaaatactctttttgtagaatctgcaagtgaatatttggagtgctttcaggcctgtggtggaaaaggaaatatcttcacataaaaactagacagaagcattcggagaaacttctttttagtgtgtgcattcatctcacagtgttgaaactttcttttgattgagggttttgaaacagtctttttgataaatctgcaagtggatatttggagcgaattgtggcctatggtttaaaaggaaatatcttcacataaaagctagacagaagctttctgagaaacttctttgtgatatgtgcgttcatctcaccgggttgaatctttcctttcatcgagcaatattgaaacacccttttttttgaatctgaaatagatatttggagcgattgtgtcctatggtagtaaaggcaatattttcacagaaaaactagacagaagcattctgcaaaacttcctcgtgatgtgttcatttatctcaccaaattgaaccattcttttccttgagcagatttgatacactctttttgtagaatgtgcaagtgaatatttggaacgctttgatgagtttgacggaaaaggaaataccttcacatataaacgagacagaagcattctgagaaacttctttctgatatgtgcattcaactcacagagttgaacctttcttttgattcagcagttttgaaacacactttttgaaggatctgtaagtggatatttggagtgcttaggggtcgatgctagaaaggaaatatctccacataaaaacttgatggaagcattctgagaaacttctttgtgatgtgtgcattcatcagagagagtttaacatttcttttgactgagcagttttgaaactctctttttgtagaatctgcaagtggacatttggagccacttgaggcctattgtggaaaagggaataaattcacataaaagctacacggaagcattctgacaaacttctttgtgatgtgcacattcatctcacagattgaaaatttcttttgattgagcagttttgaaatgctcttttcggagaatcagccagtggatatttggagcactttgaggactatggtggaaaaggaaatatcttcacataaaaactagaggaaacattctgagaaacttatttgtgatgtgtgcattcctctcacagagttgaacatttcttttgattaagcagttttgaaacactcttttgtggaatctgctagaggatatttggagcgctttgaggcctatggaggaaaaggaaatatcttcacttaaaaactagacagaagcattctgagaaacttctttgtgatgtttgcattcatctcacagggttgaaattttcttttgattgagaagttttgagacactctttttgtagaatctgcctgtggataataggagcgctttggggcatattttggaaaaggaaataccttcacataaatagtagacagaagcattctgagaaacttctttgtgacgtgtgcatatatatcacagagttgaacctttcttttcatttagccttttgaaacactctttttctagaatctgcaagtgaatatttggagcgctttgcggcctatggtggaaaataaatatcttcacataaaaactagacagaagcaatctgagaaactactttgtgatgtgtgcattcatctcacagagttgaacctttcttttgattgagcagttttgaaacactctttttgttgtatatgcaagtggatatttggagcgatttgtggtctatggtggaaaaggaaatatcttcacgtaaaaactagacagaagcactctgagaaacttccttgtgatgtgtgcattcatctcaccaagcggaaccattcttttgatggagctgttttgaaatactctttttgtagaatctgcaagtgaatatttggagtgctttcaggcctgtggtggaaaaggaaatatcttcacataaaaactagacagaagcattcggagaaacttctttttagtgtgtgcattcatctcacagtgttgaaactttcttttgattgagggttttgaaacagtctttttgataaatctgcaagtggatatttggagcgaattgtggcctatggtttaaaaggaaatatcttcacataaaagctagacagaagctttctgagaaacttctttgtgatatgtgcgttcatctcaccgggttgaatctttcctttcatcgagcaatattgaaacacccttttttttgaatctgaaatagatatttggagcgattgtgtcctatggtagtaaaggcaatattttcacagaaaaactagacagaagcattctgcaaaacttcctcgtgatgtgttcatttatctcaccaaattgaaccattcttttccttgagcagatttgatacactctttttgtagaatgtgcaagtgaatatttggaacgctttgatgagtttgacggaaaaggaaataccttcacatataaacgagacagaagcattctgagaaacttctttctgatatgtgcattcaactcacagagttgaacctttcttttgattcagcagttttgaaacacactttttgaaggatctgtaagtggatatttggagtgcttaggggtcgatgctagaaaggaaatatctccacataaaaacttgatggaagcattctgagaaacttctttgtgatgtgtgcattcatcagagagagtttaacatttcttttgactgagcagttttgaaactctctttttgtagaatctgcaagtggacatttggagccacttgaggcctattgtggaaaagggaataaattcacataaaagctacacggaagcattctgacaaacttctttgtgatgtgcacattcatctcacagattgaaaatttcttttgattgagcagttttgaaatgctcttttcggagaatcagccagtggatatttggagcactttgaggactatggtggaaaaggaaatatcttcacataaaaactagaggaaacattctgagaaacttatttgtgatgtgtgcattcctctcacagagttgaacatttcttttgattaagcagttttgaaacactcttttgtggaatctgctagaggatatttggagcgctttgaggcctatggaggaaaaggaaatatcttcacttaaaaactagacagaagcattctgagaaacttctttgtgatgtttgcattcatctcacagggttgaaattttcttttgattgagaagttttgagacactctttttgtagaatctgcctgtggataataggagcgctttggggcatattttggaaaaggaaataccttcacataaatagtagacagaagcattctgagaaacttctttgtgacgtgtgcatatatatcacagagttgaacctttcttttcatttagccttttgaaacactctttttctagaatctgcaagtgaatatttggagcgctttgcggcctatggtggaaaataaatatcttcacataaaaactagacagaagcaatctgagaaactactttgtgatgtgtgcattcatctcacagagttgaacctttcttttgattgagcagttttgaaacactctttttgttgtatatgcaagtggatatttggagcgatttgtggtctatggtggaaaaggaaatatcttcacgtaaaaactagacagaagcactctgagaaacttccttgtgatgtgtgcattcatctcaccaagcggaaccattcttttgatggagctgttttgaaatactctttttgtagaatctgcaagtgaatatttggagtgctttcaggcctgtggtggaaaaggaaatatcttcacataaaaactagacagaagcattcggagaaacttctttttagtgtgtgcattcatctcacagtgttgaaactttcttttgattgagggttttgaaacagtctttttgataaatctgcaagtggatatttggagcgaattgtggcctatggtttaaaaggaaatatcttcacataaaagctagacagaagctttctgagaaacttctttgtgatatgtgcgttcatctcaccgggttgaatctttcctttcatcgagcaatattgaaacacccttttttttgaatctgaaatagatatttggagcgattgtgtcctatggtagtaaaggcaatattttcacagaaaaactagacagaagcattctgcaaaacttcctcgtgatgtgttcatttatctcaccaaattgaaccattcttttccttgagcagatttgatacactctttttgtagaatgtgcaagtgaatatttggaacgctttgatgagtttgacggaaaaggaaataccttcacatataaacgagacagaagcattctgagaaacttctttctgatatgtgcattcaactcacagagttgaacctttcttttgattcagcagttttgaaacacactttttgaaggatctgtaagtggatatttggagtgcttaggggtcgatgctagaaaggaaatatctccacataaaaacttgatggaagcattctgagaaacttctttgtgatgtgtgcattcatcagagagagtttaacatttcttttgactgagcagttttgaaactctctttttgtagaatctgcaagtggacatttggagccacttgaggcctattgtggaaaagggaataaattcacataaaagctacacggaagcattctgacaaacttctttgtgatgtgcacattcatctcacagattgaaaatttcttttgattgagcagttttgaaatgctcttttcggagaatcagccagtggatatttggagcactttgaggactatggtggaaaaggaaatatcttcacataaaaactagaggaaacattctgagaaacttatttgtgatgtgtgcattcctctcacagagttgaacatttcttttgattaagcagttttgaaacactcttttgtggaatctgctagaggatatttggagcgctttgaggcctatggaggaaaaggaaatatcttcacttaaaaactagacagaagcattctgagaaacttctttgtgatgtttgcattcatctcacagggttgaaattttcttttgattgagaagttttgagacactctttttgtagaatctgcctgtggataataggagcgctttggggcatattttggaaaaggaaataccttcacataaatagtagacagaagcattctgagaaacttctttgtgacgtgtgcatatatatcacagagttgaacctttcttttcatttagccttttgaaacactctttttctagaatctgcaagtgaatatttggagcgctttgcggcctatggtggaaaataaatatcttcacataaaaactagacagaagcaatctgagaaactactttgtgatgtgtgcattcatctcacagagttgaacctttcttttgattgagcagttttgaaacactctttttgttgtatatgcaagtggatatttggagcgatttgtggtctatggtggaaaaggaaatatcttcacgtaaaaactagacagaagcactctgagaaacttccttgtgatgtgtgcattcatctcaccaagcggaaccattcttttgatggagctgttttgaaatactctttttgtagaatctgcaagtgaatatttggagtgctttcaggcctgtggtggaaaaggaaatatcttcacataaaaactagacagaagcattcggagaaacttctttttagtgtgtgcattcatctcacagtgttgaaactttcttttgattgagggttttgaaacagtctttttgataaatctgcaagtggatatttggagcgaattgtggcctatggtttaaaaggaaatatcttcacataaaagctagacagaagctttctgagaaacttctttgtgatatgtgcgttcatctcaccgggttgaatctttcctttcatcgagcaatattgaaacacccttttttttgaatctgaaatagatatttggagcgattgtgtcctatggtagtaaaggcaatattttcacagaaaaactagacagaagcattctgcaaaacttcctcgtgatgtgttcatttatctcaccaaattgaaccattcttttccttgagcagatttgatacactctttttgtagaatgtgcaagtgaatatttggaacgctttgatgagtttgacggaaaaggaaataccttcacatataaacgagacagaagcattctgagaaacttctttctgatatgtgcattcaactcacagagttgaacctttcttttgattcagcagttttgaaacacactttttgaaggatctgtaagtggatatttggagtgcttaggggtcgatgctagaaaggaaatatctccacataaaaacttgatggaagcattctgagaaacttctttgtgatgtgtgcattcatcagagagagtttaacatttcttttgactgagcagttttgaaactctctttttgtagaatctgcaagtggacatttggagccacttgaggcctattgtggaaaagggaataaattcacataaaagctacacggaagcattctgacaaacttctttgtgatgtgcacattcatctcacagattgaaaatttcttttgattgagcagttttgaaatgctcttttcggagaatcagccagtggatatttggagcactttgaggactatggtggaaaaggaaatatcttcacataaaaactagaggaaacattctgagaaacttatttgtgatgtgtgcattcctctcacagagttgaacatttcttttgattaagcagttttgaaacactcttttgtggaatctgctagaggatatttggagcgctttgaggcctatggaggaaaaggaaatatcttcacttaaaaactagacagaagcattctgagaaacttctttgtgatgtttgcattcatctcacagggttgaaattttcttttgattgagaagttttgagacactctttttgtagaatctgcctgtggataataggagcgctttggggcatattttggaaaaggaaataccttcacataaatagtagacagaagcattctgagaaacttctttgtgacgtgtgcatatatatcacagagttgaacctttctttccatttagccttttgaaacactctttttctagaatctgcaagtgaatatttggagcgctttgcggcctatggtggaaaataaatatcttcacataaaaactagacagaagcaatctgagaaactactttgtgatgtgtgcattcatctcacagagttgaacctttcttttgattgagcagttttgaaacactctttttgttgtatatgcaagtggatatttggagcgatttgtggtctatggtggaaaaggaaatatcttcacgtaaaaactagacagaagcactctgagaaacttccttgtgatgtgtgcattcatctcaccaagcggaaccattcttttgatggagctgttttgaaatactctttttgtagaatctgcaagtgaatatttggagtgctttcaggcctgtggtggaaaaggaaatatcttcacataaaaactagacagaagcattcggagaaacttctttttagtgtgtgcattcatctcacagtgttgaaactttcttttgattgagggttttgaaacagtctttttgataaatctgcaagtggatatttggagcgaattgtggcctatggtttaaaaggaaatatcttcacataaaagctagacagaagctttctgagaaacttctttgtgatatgtgcgttcatctcaccgggttgaatctttcctttcatcgagcaatattgaaacacccttttttttgaatctgaaatagatatttggagcgattgtgtcctatggtagtaaaggcaatattttcacagaaaaactagacagaagcattctgcaaaacttcctcgtgatgtgttcatttatctcaccaaattgaaccattcttttccttgagcagatttgatacactctttttgtagaatgtgcaagtgaatatttggaacgctttgatgagtttgacggaaaaggaaataccttcacatataaacgagacagaagcattctgagaaacttctttctgatatgtgcattcaactcacagagttgaacctttcttttgattcagcagttttgaaacacactttttgaaggatctgtaagtggatatttggagtgcttaggggtcgatgctagaaaggaaatatctccacataaaaacttgatggaagcattctgagaaacttctttgtgatgtgtgcattcatcagagagagtttaacatttcttttgactgagcagttttgaaactctctttttgtagaatctgcaagtggacatttggagccacttgaggcctattgtggaaaagggaataaattcacataaaagctacacggaagcattctgacaaacttctttgtgatgtgcacattcatctcacagattgaaaatttcttttgattgagcagttttgaaatgctcttttcggagaatcagccagtggatatttggagcactttgaggactatggtggaaaaggaaatatcttcacataaaaactagaggaaacattctgagaaacttatttgtgatgtgtgcattcctctcacagagttgaacatttcttttgattaagcagttttgaaacactcttttgtggaatctgctagaggatatttggagcgctttgaggcctatggaggaaaaggaaatatcttcacttaaaaactagacagaagcattctgagaaacttctttgtgatgtttgcattcatctcacagggttgaaattttcttttgattgagaagttttgagacactctttttgtagaatctgcctgtggataataggagcgctttggggcatattttggaaaaggaaataccttcacataaatagtagacagaagcattctgagaaacttctttgtgacgtgtgcatatatatcacagagttgaacctttcttttcatttagccttttgaaacactctttttctagaatctgcaagtgaatatttggagcgctttgcggcctatggtggaaaataaatatcttcacataaaaactagacagaagcaatctgagaaactactttgtgatgtgtgcattcatctcacagagttgaacctttcttttgattgagcagttttgaaacactctttttgttgtatatgcaagtggatatttggagcgatttgtggtctatggtggaaaaggaaatatcttcacgtaaaaactagacagaagcactctgagaaacttccttgtgatgtgtgcattcatctcaccaagcggaaccattcttttgatggagctgttttgaaatactctttttgtagaatctgcaagtgaatatttggagtgctttcaggcctgtggtggaaaaggaaatatcttcacataaaaactagacagaagcattcggagaaacttctttttagtgtgtgcattcatctcacagtgttgaaactttcttttgattgagggttttgaaacagtctttttgataaatctgcaagtggatatttggagcgaattgtggcctatggtttaaaaggaaatatcttcacataaaagctagacagaagctttctgagaaacttctttgtgatatgtgcgttcatctcaccgggttgaatctttcctttcatcgagcaatattgaaacacccttttttttgaatctgaaatagatatttggagcgattgtgtcctatggtagtaaaggcaatattttcacagaaaaactagacagaagcattctgcaaaacttcctcgtgatgtgttcatttatctcaccaaattgaaccattcttttccttgagcagatttgatacactctttttgtagaatgtgcaagtgaatatttggaacgctttgatgagtttgacggaaaaggaaataccttcacatataaacgagacagaagcattctgagaaacttctttctgatatgtgcattcaactcacagagttgaacctttcttttgattcagcagttttgaaacacactttttgaaggatctgtaagtggatatttggagtgcttaggggtcgatgctagaaaggaaatatctccacataaaaacttgatggaagcattctgagaaacttctttgtgatgtgtgcattcatcagagagagtttaacatttcttttgactgagcagttttgaaactctctttttgtagaatctgcaagtggacatttggagccacttgaggcctattgtggaaaagggaataaattcacataaaagctacacggaagcattctgacaaacttctttgtgatgtgcacattcatctcacagattgaaaatttcttttgattgagcagttttgaaatgctcttttcggagaatcagccagtggatatttggagcactttgaggactatggtggaaaaggaaatatcttcacataaaaactagaggaaacattctgagaaacttatttgtgatgtgtgcattcctctcacagagttgaacatttcttttgattaagcagttttgaaacactcttttgtggaatctgctagaggatatttggagcgctttgaggcctatggaggaaaaggaaatatcttcacttaaaaactagacagaagcattctgagaaacttctttgtgatgtttgcattcatctcacagggttgaaattttcttttgattgagaagttttgagacactctttttgtagaatctgcctgtggataataggagcgctttggggcatattttggaaaaggaaataccttcacataaatagtagacagaagcattctgagaaacttctttgtgacgtgtgcatatatatcacagagttgaacctttcttttcatttagccttttgaaacactctttttctagaatctgcaagtgaatatttggagcgctttgcggcctatggtggaaaataaatatcttcacataaaaactagacagaagcaatctgagaaactactttgtgatgtgtgcattcatctcacagagttgaacctttcttttgattgagcagttttgaaacactctttttgttgtatatgcaagtggatatttggagcgatttgtggtctatggtggaaaaggaaatatcttcacgtaaaaactagacagaagcactctgagaaacttctttgtgatgtgtgcattcatctcaccaagcggaaccattcttttgatggagctgttttgaaatactctttttgtagaatctgcaagtgaatatttggagtgctttcaggcctgtggtggaaaaggaaatatcttcacataaaaactagacagaagcattcggagaaacttctttttagtgtgtgcattcatctcacagtgttgaaactttcttttgattgagggttttgaaacagtctttttgataaatctgcaagtggatatttggagcgaattgtggcctatggtttaaaaggaaatatcttcacataaaagctagacagaagctttctgagaaacttctttgtgatatgtgcgttcatctcaccgggttgaatctttcctttcatcgagcaatattgaaacacccttttttttgaatctgaaatagatatttggagcgattgtgtcctatggtagtaaaggcaatattttcacagaaaaactagacagaagcattctgcaaaacttcctcgtgatgtgttcatttatctcaccaaattgaaccattcttttccttgagcagatttgatacactctttttgtagaatgtgcaagtgaatatttggaacgctttgatgagtttgacggaaaaggaaataccttcacatataaacgagacagaagcattctgagaaacttctttctgatatgtgcattcaactcacagagttgaacctttcttttgattcagcagttttgaaacacactttttgaaggatctgtaagtggatatttggagtgcttaggggtcgatgctagaaaggaaatatctccacataaaaacttgatggaagcattctgagaaacttctttgtgatgtgtgcattcatcagagagagtttaacatttcttttgactgagcagttttgaaactctctttttgtagaatctgcaagtggacatttggagccacttgaggcctattgtggaaaagggaataaattcacataaaagctacacggaagcattctgacaaacttctttgtgatgtgcacattcatctcacagattgaaaatttcttttgattgagcagttttgaaatgctcttttcggagaatcagccagtggatatttggagcactttgaggactatggtggaaaaggaaatatcttcacataaaaactagaggaaacattctgagaaacttatttgtgatgtgtgcattcctctcacagagttgaacatttcttttgattaagcagttttgaaacactcttttgtggaatctgctagaggatatttggagcgctttgaggcctatggaggaaaaggaaatatcttcacttaaaaactagacagaagcattctgagaaacttctttgtgatgtttgcattcatctcacagggttgaaattttcttttgattgagaagttttgagacactctttttgtagaatctgcctgtggataataggagcgctttggggcatattttggaaaaggaaataccttcacataaatagtagacagaagcattctgagaaacttctttgtgacgtgtgcatatatatcacagagttgaacctttcttttcatttagccttttgaaacactctttttctagaatctgcaagtgaatatttggagcgctttgcggcctatggtggaaaataaatatcttcacataaaaactagacagaagcaatctgagaaactactttgtgatgtgtgcattcatctcacagagttgaacctttcttttgattgagcagttttgaaacactctttttgttgtatatgcaagtggatatttggagcgatttgtggtctatggtggaaaaggaaatatcttcacgtaaaaactagacagaagcactctgagaaacttccttgtgatgtgtgcattcatctcaccaagcggaaccattcttttgatggagctgttttgaaatactctttttgtagaatctgcaagtgaatatttggagtgctttcaggcctgtggtggaaaaggaaatatcttcacataaaaactagacagaagcattcggagaaacttctttttagtgtgtgcattcatctcacagtgttgaaactttcttttgattgagggttttgaaacagtctttttgataaatctgcaagtggatatttggagcgaattgtggcctatggtttaaaaggaaatatcttcacataaaagctagacagaagctttctgagaaacttctttgtgatatgtgcgttcatctcaccgggttgaatctttcctttcatcgagcaatattgaaacacccttttttttgaatctgaaatagatatttggagcgattgtgtcctatggtagtaaaggcaatattttcacagaaaaactagacagaagcattctgcaaaacttcctcgtgatgtgttcatttatctcaccaaattgaaccattcttttccttgagcagatttgatacactctttttgtagaatgtgcaagtgaatatttggaacgctttgatgagtttgacggaaaaggaaataccttcacatataaacgagacagaagcattctgagaaacttctttctgatatgtgcattcaactcacagagttgaacctttcttttgattcagcagttttgaaacacactttttgaaggatctgtaagtggatatttggagtgcttaggggtcgatgctagaaaggaaatatctccacataaaaacttgatggaagcattctgagaaacttctttgtgatgtgtgcattcatcagagagagtttaacatttcttttgactgagcagttttgaaactctctttttgtagaatctgcaagtggacatttggagccacttgaggcctattgtggaaaagggaataaattcacataaaagctacacggaagcattctgacaaacttctttgtgatgtgcacattcatctcacagattgaaaatttcttttgattgagcagttttgaaatgctcttttcggagaatcagccagtggatatttggagcactttgaggactatggtggaaaaggaaatatcttcacataaaaactagaggaaacattctgagaaacttatttgtgatgtgtgcattcctctcacagagttgaacatttcttttgattaagcagttttgaaacactcttttgtggaatctgctagaggatatttggagcgctttgaggcctatggaggaaaaggaaatatcttcacttaaaaactagacagaagcattctgagaaacttctttgtgatgtttgcattcatctcacagggttgaaattttcttttgattgagaagttttgagacactctttttgtagaatctgcctgtggataataggagcgctttggggcatattttggaaaaggaaataccttcacataaatagtagacagaagcattctgagaaacttctttgtgacgtgtgcatatatatcacagagttgaacctttcttttcatttagccttttgaaacactctttttctagaatctgcaagtgaatatttggagcgctttgcggcctatggtggaaaataaatatcttcacataaaaactagacagaagcaatctgagaaactactttgtgatgtgtgcattcatctcacagagttgaacctttcttttgattgagcagttttgaaacactctttttgttgtatatgcaagtggatatttggagcgatttgtggtctatggtggaaaaggaaatatcttcacgtaaaaactagacagaagcactctgagaaacttccttgtgatgtgtgcattcatctcaccaagcggaaccattcttttgatggagctgttttgaaatactctttttgtagaatctgcaagtgaatatttggagtgctttcaggcctgtggtggaaaaggaaatatcttcacataaaaactagacagaagcattcggagaaacttctttttagtgtgtgcattcatctcacagtgttgaaactttcttttgattgagggttttgaaacagtctttttgataaatctgcaagtggatatttggagcgaattgtggcctatggtttaaaaggaaatatcttcacataaaagctagacagaagctttctgagaaacttctttgtgatatgtgcgttcatctcaccgggttgaatctttcctttcatcgagcaatattgaaacacccttttttttgaatctgaaatagatatttggagcgattgtgtcctatggtagtaaaggcaatattttcacagaaaaactagacagaagcattctgcaaaacttcctcgtgatgtgttcatttatctcaccaaattgaaccattcttttccttgagcagatttgatacactctttttgtagaatgtgcaagtgaatatttggaacgctttgatgagtttgacggaaaaggaaataccttcacatataaacgagacagaagcattctgagaaacttctttctgatatgtgcattcaactcacagagttgaacctttcttttgattcagcagttttgaaacacactttttgaaggatctgtaagtggatatttggagtgcttaggggtcgatgctagaaaggaaatatctccacataaaaacttgatggaagcattctgagaaacttctttgtgatgtgtgcattcatcagagagagtttaacatttcttttgactgagcagttttgaaactctctttttgtagaatctgcaagtggacatttggagccacttgaggcctattgtggaaaagggaataaattcacataaaagctacacggaagcattctgacaaacttctttgtgatgtgcacattcatctcacagattgaaaatttcttttgattgagcagttttgaaatgctcttttcggagaatcagccagtggatatttggagcactttgaggactatggtggaaaaggaaatatcttcacataaaaactagaggaaacattctgagaaacttatttgtgatgtgtgcattcctctcacagagttgaacatttcttttgattaagcagttttgaaacactcttttgtggaatctgctagaggatatttggagcgctttgaggcctatggaggaaaaggaaatatcttcacttaaaaactagacagaagcattctgagaaacttctttgtgatgtttgcattcatctcacagggttgaaattttcttttgattgagaagttttgagacactctttttgtagaatctgcctgtggataataggagcgctttggggcatattttggaaaaggaaataccttcacataaatagtagacagaagcattctgagaaacttctttgtgacgtgtgcatatatatcacagagttgaacctttcttttcatttagccttttgaaacactctttttctagaatctgcaagtgaatatttggagcgctttgcggcctatggtggaaaataaatatcttcacataaaaactagacagaagcaatctgagaaactactttgtgatgtgtgcattcatctcacagagttgaacctttcttttgattgagcagttttgaaacactctttttgttgtatatgcaagtggatatttggagcgatttgtggtctatggtggaaaaggaaatatcttcacgtaaaaactagacagaagcactctgagaaacttccttgtgatgtgtgcattcatctcaccaagcggaaccattcttttgatggagctgttttgaaatactctttttgtagaatctgcaagtgaatatttggagtgctttcaggcctgtggtggaaaaggaaatatcttcacataaaaactagacagaagcattcggagaaacttctttttagtgtgtgcattcatctcacagtgttgaaactttcttttgattgagggttttgaaacagtctttttgataaatctgcaagtggatatttggagcgaattgtggcctatggtttaaaaggaaatatcttcacataaaagctagacagaagctttctgagaaacttctttgtgatatgtgcgttcatctcaccgggttgaatctttcctttcatcgagcaatattgaaacacccttttttttgaatctgaaatagatatttggagcgattgtgtcctatggtagtaaaggcaatattttcacagaaaaactagacagaagcattctgcaaaacttcctcgtgatgtgttcatttatctcaccaaattgaaccattcttttccttgagcagatttgatacactctttttgtagaatgtgcaagtgaatatttggaacgctttgatgagtttgacggaaaaggaaataccttcacatataaacgagacagaagcattctgagaaacttctttctgatatgtgcattcaactcacagagttgaacctttcttttgattcagcagttttgaaacacactttttgaaggatctgtaagtggatatttggagtgcttaggggtcgatgctagaaaggaaatatctccacataaaaacttgatggaagcattctgagaaacttctttgtgatgtgtgcattcatcagagagagtttaacatttcttttgactgagcagttttgaaactctctttttgtagaatctgcaagtggacatttggagccacttgaggcctattgtggaaaagggaataaattcacataaaagctacacggaagcattctgacaaacttctttgtgatgtgcacattcatctcacagattgaaaatttcttttgattgagcagttttgaaatgctcttttcggagaatcagccagtggatatttggagcactttgaggactatggtggaaaaggaaatatcttcacataaaaactagaggaaacattctgagaaacttatttgtgatgtgtgcattcctctcacagagttgaacatttcttttgattaagcagttttgaaacactcttttgtggaatctgctagaggatatttggagcgctttgaggcctatggaggaaaaggaaatatcttcacttaaaaactagacagaagcattctgagaaacttctttgtgatgtttgcattcatctcacagggttgaaattttcttttgattgagaagttttgagacactctttttgtagaatctgcctgtggataataggagcgctttggggcatattttggaaaaggaaataccttcacataaatagtagacagaagcattctgagaaacttctttgtgacgtgtgcatatatatcacagagttgaacctttcttttcatttagccttttgaaacactctttttctagaatctgcaagtgaatatttggagcgctttgcggcctatggtggaaaataaatatcttcacataaaaactagacagaagcaatctgagaaactactttgtgatgtgtgcattcatctcacagagttgaacctttcttttgattgagcagttttgaaacactctttttgttgtatatgcaagtggatatttggagcgatttgtggtctatggtggaaaaggaaatatcttcacgtaaaaactagacagaagcactctgagaaacttccttgtgatgtgtgcattcatctcaccaagcggaaccattcttttgatggagctgttttgaaatactctttttgtagaatctgcaagtgaatatttggagtgctttcaggcctgtggtggaaaaggaaatatcttcacataaaaactagacagaagcattcggagaaacttctttttagtgtgtgcattcatctcacagtgttgaaactttcttttgattgagggttttgaaacagtctttttgataaatctgcaagtggatatttggagcgaattgtggcctatggtttaaaaggaaatatcttcacataaaagctagacagaagctttctgagaaacttctttgtgatatgtgcgttcatctcaccgggttgaatctttcctttcatcgagcaatattgaaacacccttttttttgaatctgaaatagatatttggagcgattgtgtcctatggtagtaaaggcaatattttcacagaaaaactagacagaagcattctgcaaaacttcctcgtgatgtgttcatttatctcaccaaattgaaccattcttttccttgagcagatttgatacactctttttgtagaatgtgcaagtgaatatttggaacgctttgatgagtttgacggaaaaggaaataccttcacatataaacgagacagaagcattctgagaaacttctttctgatatgtgcattcaactcacagagttgaacctttcttttgattcagcagttttgaaacacactttttgaaggatctgtaagtggatatttggagtgcttaggggtcgatgctagaaaggaaatatctccacataaaaacttgatggaagcattctgagaaacttctttgtgatgtgtgcattcatcagagagagtttaacatttcttttgactgagcagttttgaaactctctttttgtagaatctgcaagtggacatttggagccacttgaggcctattgtggaaaagggaataaattcacataaaagctacacagaagcattctgacaaacttctttgtgatgtgcacattcatctcacagattgaaaatttcttttgattgagcagttttgaaatgctcttttcggagaatcagccagtggatatttggagcactttgaggactatggtggaaaaggaaatatcttcacataaaaactagaggaaacattctgagaaacttatttgtgatgtgtgcattcctctcacagagttgaacatttcttttgattaagcagttttgaaacactcttttgtggaatctgctagaggatatttggagcgctttgaggcctatggaggaaaaggaaatatcttcacttaaaaactagacagaagcattctgagaaacttctttgtgatgtttgcattcatctcacagggttgaaattttcttttgattgagaagttttgagacactctttttgtagaatctgcctgtggataataggagcgctttggggcatattttggaaaaggaaataccttcacataaatagtagacagaagcattctgagaaacttctttgtgacgtgtgcatatatatcacagagttgaacctttcttttcatttagccttttgaaacactctttttctagaatctgcaagtgaatatttggagcgctttgcggcctatggtggaaaataaatatcttcacataaaaactagacagaagcaatctgagaaactactttgtgatgtgtgcattcatctcacagagttgaacctttcttttgattgagcttttttgaaacactctttttgtataatctgcaagtggatatttggagcgctttgaggcttatggtggaaaatgaaacatattcacgtaaaaactagacagcagcattctgagaaacttctttgtaatgtgtgcattcatctcacagaagttaacctttcttttgattgagcagttttgaaacactctttttgtagaatctgcaattggatatatggatcgttttgaggtctaccatgcaaaagatatatcttcacataaaaactagacagaatctttctgagaaacttctttgtgatgtgcgcattcatcttacagtggtgaacctttcttttgattcagcagttttcaaacactctttttgtagaatttgcaagtggatatttgcagcgcttaggggcttatggtgaaaaaggaaatatctccacataaaaacttgacggaagcactctgagaaacttctttgatgtgtgcattcaactcacagagtagaaccgtccttttgatttagcagttttgaaccactctttttgtagaatctacaagtggatatttggagccctttgtggcccacagtggaaatggaaatatcttcacataaaaactagacagaagcattctgagaaacttctttgtgatgtgtgcattcatctcacaaagttgaatgtctctgttgattgagcagttttgaaacactctttttgtagaatctgcaagtgggtatttggagctcattggggcctactgtggaaaaacaaatatcttcccaatttctttgtgatgtgtgcattcatctcacagagtggaactttcttttgattgagcagtgttgaaacactctttttgtagaatcttcaggagagtatttggagtgctttgctgcatacgttgtaaaaggaagtatcttgacataaaagctagacggaagaattctgaaaaacttatttgtgatgtgcgcgttcatctgacagagttgaacctttcttttgattgagcagttttgaaacactctttttgtagtatctgtaaatggatatttgaagcgatttgaggtctatggtggaaaaggaaatatcttcacatataaactagacagaagcattctgagaaatttctctgtgatttgtgcattcatctcacagagttgaacatttcttttgattgagcagttttgaatcactctttttgtagaatcttttggtagaatctttttgtagtgaatattttgagtgcttttaggcctttggtggaaaagcaaatatctttgcatcaaaactagacagatgcattttgagaaacttctttgtgatgtgtgcattcatctcacagatttaaacctttcctttgattgaacagttttgaaactctgtttttggtgaatctgcaagtggatatttggagcgcttagaggcctatgctgtaaaacaaatatattcacataaaaaccagacagaagcattctgagaaacttctttgtgatgtgtgcactcatctcacagagttgaacctttcttttggttgcgtagttttgaaacactctttttgtagcatctgcaagtgtatatttggagcggtttgcctcctatggtggaaaaggaaatatcttcacataaaaactagacagatgtattctgagaaacttctttgtgatgtgtgcattcatctcacagaggtgaacttctagtgttttggactcatccaagcctcaacattagctttaagagctccttgatctttccagcgggagaaaaatgaacatgcaaagctctcaggctcattgttataatcctctcaaggatcagtctcattagcagacagcacagtcttgatcccttgtttcaccaagctatcaacttggctgagagaagttgttgttagtcctaggggaacttctcatatcccttgcaagctcttcaagtatttgtgtattttcccctttcagaaagttgtgtttatctcagcatcccattgtcatctccaaaattaaataattgtgaaggatctaagatttcatcctatttgtaaacaaacctattaacctttcattttcatggatgctggtagaaggcatgagacactgaagcatgaaaaaaatacctacaatttactgtctacctggaggcaaaagactcatatttgtattagttctccgtgtccatactacattttttagagggacttcaaaaggctcagatggacattgcacttggggaaggtttgtgtcacagctgagcagactcaagactaagaaacctcaatcttcttaaagtaggttacatgcaaacctgtccaacctttgcctcacagagaaaaattgtctttattatattgattgagcaatttatctgccattcacctgaagagaaaaactactaccctttttccaggttattcgtgtacaaaaatctttgaaaaatagcctggaacaggacaggtatgtgatgtaagacacaacaaaatgacaaactctaagagacttttacagaactacatctcagtagcatgcatcttttccataaaatgttgcactaaacaatcctgtgatgaaaaaaatccattgaagatatttgacatgaagactaactttggttgttttgtgttgtgggattgttcaagtgattctcctgtgtcagcctccaaagtagctggagtacaggctcccacgaccacactcagcttatttttctatttttagtagaggtggggttttactatgttggtcaggctggtctcgaactcctgatctcaggtggtccgcctgccttggcctcacaaagtgctaggaatataggcatgagccaccatgcccgaccccagaaatgaaagttctatgtgtgcagtaatgtaattctgactgataaatgacaggtgacagtaagtgaaaatctaacacaattcaacatttctacatatttagacacattgtaattggttagcttattggaaaaagttaaatgactaccaatttatacggcatatttattctgaatgaattgctaatctagatttgagagatgaaataattatttttacaacacagaaacataaagtgcatttccatataccaacaatgaacaatttgacagtaaattaataaaacaattgtttgcaacaacattaaaataatataattcttagcaataaatttaataagaaggtacatattttgtacaataaaaaatacaggatcagaatatttatgaaaaaaactaaaaaggacttaaataactggcaacaaattccatgttcctgaacctgaagacttaatgaagttaagatgaaaatactgctacccaaagtagtgtacagatgtactgtaatcccaatttttaatttttccaacttttcttttgcaaaaacaaaataattcatttaaaacttcatatgaaatttgaaaatcctctgaatgtacagaataatcttgaaaagaagaacataattagatatttcacaattttaaatttgaaaacatacaaagctactataacagtttgctagtggcataagaacaattgtagagatcaaataaataaaatagataatccaaaaaacccttgcataaattattgattgtcttttgacaagggtgccttagtcattatgtaaagaaagggacagtttgttccacaataaattctgggaaaacaagttcacatttaaaccagtaaagttgaatctttatcacattccaagtacaaaaattaaataaaaatagattaaagacataagtgttcaactttaatggtttctaatggttgtttttatttatgtggggtcagtattaacatgaacacctttatacacacaaactagaaaactttaaagaaatagatacattactagatatacacactctcccaagattaagccaggaagacaattatttcctgaatggaccaataaaaagctctgatattatataggtaataagtagcttgccaatcaaaaaaatgaaagccctggactttatggatttgcagccaaattctacaaaatgtacaaagaagagcttgtacaattcctacagaaactatccccaaaaattgaggaggatggtctcctcccaaactcattctatgaggacagcatgatcttgacaccaaaatctggcagagacacaacaaaaacacaaaattagccgggcttggtagcagacacctgtagtcccagctacttgggaggctgaggcaggagaatggcatgaacccaggaggcggagcttgcattaagcagagattgcgccagtgcactccagcctgggcaacagagggaaactctgtcaaaaaaaaaaaaaaaagaaagaaagaaaagaaaacttcaggccaatattcttgacaagcatcattacaaaagttttcagaaaaatatttgtaaaccaaatccagcagcacatcaaacaggtaatccgtcattatcaagtaggctgcctccttaggatgcaaggttggtccagcatgtgcaaatcaataaatgtaatacatcacataaacagaactaaaaacaaaaaacagacgattatcccaatagatgcagaaaataataaaagccgtgtataacaaacccacagccaacaatctgttgaatgggcaaaagttgggagcgttttttttttgaaaaccagcacaaggcaagaatgccctctctcaccatttctattcaacatagtattgaaagtcctgaccagggcaatcaggctagagaaagaaatacaaaaagcatccaaataggaagagagaaagccaaactatttctgtttgcagataacataattctatatctagaaaaccctgtagtttcagctacaaagcttctttagttaacaaacaacttcagcgaattttcaagatactaaatcaatgtgcaaagatcactaacatttctctacaccaatgataaccacactgacagcaaaatcagaaaggccatcccattcacaattgccacagaaataataaaatacctggaaatgcagctcaccagggaggtgaaagagctctacaatgagaattacaaaacactgctcaaagaaatcagagaagacacaaacaaatggaaaaccaccccatgctcatggataggaatatccaatatgactaaaatggctatacttcacaaagcaattgacagatttaatgctatttccatcaaactgccaataaaattttttacagagctagaaaaaactattttaaaattcctataggctgggtgcagtggctcacgcctgtaatcccagcactctgggaggccgaggggtgcagatcatgaggtcaggagatcgaaaccatcctggccaacatggtgaaactccttctcaactaaaaatacaaaaaatagctgggcctagtggcaagcgcttgtaatcccagctactcgggaggctgaggcaggagaatccattgaaccagggagtcagaggttgcagtgagctgagattgcaccactgcactgaagcctgatgatagagtgatattccatcaaaaaaaattatatatatgaaaccaaaaaggagcacacatagccaaggcaatcctaagcaaaaaagaacaaagctgcaggcatcaggttgcctggcttcaaattacactacagggctatagtaatgaaaacagcataatactgatacaaaaacagacacatagacaaatggagcagaatagagagcccagaaacaaggctgcacatctatgcccatgtgataattgacaaggccgacaaaaacaagcaatgagaaaaagattatttattcaataagtggtgctggaataattggctggcaatatgtggcagattgaagctggaccctttatttacatcatatacaaaaagaaaatcaactcaagactgattgaagacttaaatgtaaaatctttatgtataaaaactatgaaagacaatccaggcaataccatcctggatataggaaagggcaaagatttcatgatagaaataccaaaagcaatagcaagaaaagcaaaaattaacaggtaggatttaattaaagtaaagagattttgcatagcagaaaaaaaactattaacagagtaaacagaaaaactatggagtggaaaaaaatatttgtaaactatctatctaacaaaggtctaatatctatcatctataaggaaattaaatttacaaaagaaaaacaaccccattaaaaagtgggcaaagacatgaacagttttcgaaagaagacatacatgaggccaacaagtgtatgagaaaaagctcagcatcaatgatagttagagaaatgaaaattaaaaccacaatgaaatgccatctcacactagtcagaatggctatagtcaaacaataaatgctggagaggttgtagagaaaagggaacttatacactgttggtgggagtgtaaattagttcaactgctgtggaaagcagtttggcaattcctcaaagagctaaaagcagaactaacattcaatagttctgctcgcaatcccattactgcgtatatttccagaaaaataggaattattctaccataaagacacatgcatgcaaatgttcactgcagccctattcacaacagcaaatgtgctacgtatacattatggaatactatgtacccataaaaaagaatgagattatgtcttttgtgggaaaatagatgtagctggatactactgtccttagcaaactaacacaggaagagaaaaccaaatatcgcatgttctgacttataagtgggagctaaataataagaatgtatgaacacgaggaggaaaacagtagaccctggggtctatttcaagtaagagggtgggaggagggaaagaagcagaaaagatagccactgggtactgggcttaatacctgggtgatgaaatcatctctacagcaaactcctgtgacatatgtttacctgtgtaacaaaccttcacacatatacccgaacttactgtaaaagtttcaaaaagttaaactttaaaaactcttaggaaaaagcataagcaaaaatcttataactttaaattttgtgatggtttcttgactgtaacaccaaaagcataggccagaaaataaaaaacagataaattggacttgatttaaatgtgaattttttgatatgaaaagcactctgttgttcgtgttttttgatagaaaaaaccccacctctactaaaatttgatacaaaaagcatgaacaagagagtgaaaagacaaccagcaaatgggagaaaagatttgcaaagcatgtaactgattgggtacataaggtaaaatataataagcaggatatataaagaacttctaaaactcaacaacaaaacgaaacaacagcatttataaaagggcagaggacttgtatctacattgggtcaaaaagtctacagaaaaatgctcaacatcaccagtcatgatggacatggataacaaaaccacaacaagttaccactttacatctattagagtggctacataaaaaccaaaacaacaaaaatgaaaaacaacaagtattggcaaggatgtgggggaagtgaaaccctggtgcatggctggtgagaatataaaatgattttttgactgtgaccaatagattggcagtgtatcagaaagttctacatagaattaccatatgtttcacaacaggtggaacagttccatatgttccaattacaggtgtatccaaaataattaaaaacaatgacataagctgcaaactctgcctctgtggattaagtgatccttgtgcctcagtctaccgaatagctgggactacaagcaagcaccacaatgcccagctaatttttgaatttttagtagagatggggttttgccatgtttccatggctggtctcgaactcctgagcttaagtgatctgcctgcctcagcctcccaaagttttgggattacaggtgtgaaccaccatgtctggactctgttattcaatctaagaactgcatgcagaaatgtgttcaggttttaaaattgtattcacttatgcactgatactttcaaagcaaattttatagcagcatcatttacagtaaaaaatttaaaaagaaatccagatatcttctaagagtcaaacagacaaagaaaatatggtatatacacacaacagaatattatttatccttaaaatgaatgtggggggggaggagccaagaaggccgaataggaacagctctgatctacagctctcagtgtgagtgatgcagaagacagttgatttctgcatttccaactgaggtaccaggttcatctcactggtgagtgccagacagtaggtgcaggacagtgggtgcagtgcaacgtgcatgagccgaagcagggcaaggcattgcctcacccgcgaagtgcaaggggtcagggaattccctttcctagtcaaagaaagtggtgacagatggcatctggaaagttgggtcactcccaccctaacactgcgcttttccaatgggcttaaaaaatgtcacaccaggatattatatcctgcacctggctcagagagtcctacgtccatggagcctcactcattgctagcacagcagtctaagatcaaactgcaaggtggcagtgaggttgggggagggacgcctgccattgctaaggcatgagtaggtaaacaaagtagccaggaagcaggaactgggtggagcccaccagagctcaaggaggcctgcctgcctctgtaggctccacctctgggggcagggcacagacaaacaaaaagtcagcagtatcctctgcagacttaaatatccctctctgacagctttgaagagtgtagtggttctcccagctcacagcttgtgatctgagaatggacaaactgcctcctcaagtgggtccttgactcctgagtagcctaactgggaggcaccccccagtagggttggactgaaacctcacacagcctggtactcttctgagacaaaacttccaggggaacgatcaggcagcagcatctgcggttcaccaatatccactgttctgcagtcaccgctgctgatacacaggcaaacagggtctggaatggacttccaataaactccaacagacctgcagctgagggtcctgactgttagaaggaaaactaacaaacagaaaggacatccacaccaaaaacccatctgtacatcaccataatcaaagcccaagttagataaaaccacaaagaagggaaacaagtagagcagaaaaactggaaactctaaaattcagagcacctctcctcctccaaaggaacacagctcctcaccagcaatggaacaaagctggatggagaatgactttgatgagttgagagaagaaggcttcagatgatcaaactactctgagctacaggaggagattcgaaccaatggcaaagaagataaaaactttgaaaaaaaatagatgaatggatcactagaataaccaatgcagagaagtccttaaaggacctgatggagctgaaaaccaaggcacgagaactaagtgatgaatgcagaagcctcagtagccgatgtgatcaactggaagaaaggatatcagtgatggaagacaaaaggaatgaaatgaagcgagaagagaagtttagcaaaaaagaataaaaagaaatgaacaaagcctccaagaaatatgggactacgtaaaaagaccaaatctacgtctgatttgtgtgcctgaaattgacgggtagaatggaaccaaactggaaaacactctgcaggatattatccaggagaacttccccaatctagcaaggcaggccaacattcaaattcagaaaatacgtagaaggcaacaaaggtactcctcgagaatagcaaatccaagacacataattgtcagattcaccaaagttgaaatgaatgaaaaaatgttaagggcagcctgagagaaaggttgggtgacccacaaagggaagcccatcagactaacatctgggggccaatattcaacattcttaaagaaaagaattttcaacccagaatttcatatccagccaaactaagcttcataaatgaagtagaaataaaatactttacagacaggcaaatgctgagagattttgtctccaacaggcctgccctaaaagagctccttaagctggttttttgaaaggatcaaaaaaatgatagaccactagcaagactaataaagaaaaaaagagaagaatcaaatagacacaataaacaatgataaaggggatatcaccaccgatcccatagaaatacaaactaccatcagagaatactacaaacacctctgtgtaaatacactaggaaatcttgaagaaatggataaattcattgacacatacactatcccaagaataaaccaggaagaagttgaatctctgaatagaccaaaaacaggagctgaagttgtggcaataatcaatagcttaccaactaaaaggagtccaggaccagatggattcacagccgaattctaccggaggtacaaggaggaactggtaccattccttctgaaaatattccaatcaatagaaaaagagggaatcctccctaactcattttatgaggctagcatcatcctgataccaaggcctggcagagacacaaccaaaaaagagaattttaaactaatatactcgattaacattgacgcaaaaatcctcaataacatactgacaaactgaatccagcagcacatcaaaaagcttatccatcatgatcaagtgggctttatctctgagatgaaaggctggttcaatatacgcaaatcaataaatataatgcagcatagaaacaaaaccaaagacaaaaaccacatgattatctcaatagatgaagaaaaggcctttgacaaaattcactgacacttcatactaaaaactctcaataaattaggtattgatgggacgtatctcaaaataataagagctatctatgccaaacccacagccaatatcatactgaatgggcaaaaactggaagcattccctttgaaaactggcacaagacagggatgccctctctcaccactcctattcaaaatagtgttggaatttctggccagggcaatcaggcaggagaaggaaataaagggcattcaattaggaaaagaggaagtcaaattgtccctgtttgcagatgacatgattgtatatctagaaaaccccattgtctcagcccaaaatctccttaagctgataagcaaattaagcaatgtctcaggatacaaaatcaatgtacaaaaatcacaagcattcttatacaccaataacagacaaacagagagccacgtcatgagtgaactcccattcacaattgcttcaaagagaatgaaatacctaggaatccaacttacaagggatgtgaaggaactcttcaaggagaaatacaaaccactgctcaatgaaataaaagaggatacaaacaaatgaaagaacattccatactcatgggtaggaatatggaagaatcaatatcgtggaaatggccatactgcccaaggtaatttatagattcaatgccatccccatcgagctactaatgactttcttcacagaattgaaaaaatactactttaaagttcatttggaaccaaaaaagagctggcatcaccaagtcaatcctaagccaaaagaacaaagctgaagtcatcacactaactgacttaaaactatactaaaaggctacagtacccagtaatcaaagcagcattgtactgttaccaaaacagagatgtagaccaatggaacagaacagagccctcagaaataatgccgcatatctacaactatctgatctttgacaaacctgagaaaaacaagaaatggggaaagtattccctatttaataaatggtgctgtgaaaactggctagccatatgtagaaagctgaaactggatcccttccttacaccttatacaaaaatcaattcaagatggattaaagacttacatattagacctaataccataaaaaacctagaagaaaacctaggcaataccattcagcacatagtcatgggcaaggacttcatgtctaaaacaccaaaagcaatggcaacaagagccaaaattgacaaatggagaaactaccatcaaagtgaacaggaaacctgcagaatgggagaaaattttcacaacctactcaactgacaaagggctaatatccagaatctgcaatgaactcaagcaaatcgacaagaaaaaatcaaacaaccccatcaaaaagtgggcgaaggatatgaacagacacttctcaaaaaaagacatttatgcagccaaaaaacacatgaaaaaatgctcatcatcactggccatcagagaaatgcaaatcaaaaccacaatgagataccatctcacaccagttagaatggtgatcattaaaaagtcaggaaacaacaggtgctggagaggatgtggagaaataggaacacttttacactgttggtgggaatgtaaactagttcaaccattgtggaagtcactgtggcgattcctcaaggatctagaactagaaataccatttgacccagccatcccattactgggtatatacacgaaggattataaatcatgctgctataaagacacatgcacacttatgtttattgcaacactattcacaatagcaaagacttggatccaacctgaatgtccaacatcgatagactggattaagaaaatgtggcacatatacaccatggaatactatgcagccataaaaaatgatgagttcatgtcctttgtagggacatggatgaaactggaaaccatcattctcagcatactagcgcaaggacaaaaaaccaaacactgcatgttctccctcagaggtgggaattgaacaatgagaacacatggacacaggaaggggaacatcacacaccatggactgttgtgggttggggtaaggggcagggatagcattaggagatatacctaatgctaaatgatgagttaatgggtgcagcaaaccaacatggcacatgtatacatatgtaacaaacctgcacgttgtgtacatgtaccctaaaacttaaagtataataataataaaataaaataaaaataaaaaagagaggaagtaagccatgctgattcctgatgagaaagcattccaagcaaaggggaccacacatgcaaaggccctgaggcagaagcacaactgcctggtgtctttgaagattgcaaaatagaggggagactgactggactacacatcagagaagtgtcaggggacaagatggtttaaaacattcctagccatggaaggttttaagcagatgaaaacattattttccttatgctttgaaaagacttactctggatcacctgaggtcaggggttcaagacctgcctggccaacatggcaaaaccacatctctattaaaaacacaaaaattagccaggtttggtggtgcatgcctgtagtcccagctacttgggagcctgaggcaggagaatcacttgaacccaggagttagcggttgtattgaacccagattgcaccactgcactccagcctgggagacagaggagactctgtctcaaaaataaataaataaataaagacttactctggttgctcagtgaagtacaaagtacagggagaaagagaaagtgggagaggagttagaaggctattttcataatccatgaaagcaatgacgtaaagtgaagcagggtgtacacaatgggtgtagcaagggaagctcagattcttaatacagttcaacagtgtatgctgatatgaggtgtaagaaacaaagaggggtcaagacaagttttctggcctaacggctggtacgctggaggtgctatttactgagtcagagaagactgaggagtgttgggcccagaggttgaaggtggaggatcaataattcccttatggatgtgtgatagttgagttgtctattagtcttccaagtggtgataatcggcagataattagatatgagtctaaattttagaggagaggtaggagctggaaatatgtgttcatggaccatgcacatatacatggaatttaatgccattgggcttcatgagatcacagaggcatgagtgcaccaagaaaaacggttgagaacagttaaaaggtaaatgttccttctacattttgaatttatagaaataatgacacagtagccagttgctgaaacactacccagttcagagtaaaacaaatttcctattttatcaaatcattgaatgccatttaaaattcagaatacttgcagagatcccaaatatcttaataaagatgaaagcctaagttcacattggtggcctagactctgccttccctgatcgtctatttaaaaataacaataatgatatggttttaggtctaatgtttaagtctttaatccatcttgaattgatttttgtgtaaggtgtaaggaagggatccagtttcagctttctacatatggctagccagttttcccagcaccatttattaaacagggaatcctttccccattgcttgtttatctcaggtttgtcaaagatcagatagttgtagatatgcagcattatttctgagggttctgttctgttccattgatctatatctctgttttggtaccagtaccatgctgttttggttactgtagccttgtagtatagtttgaagtcaggtagtgtgatgcctccagctttgttcttttggcttaggattgacttggtgatgcaggctcttttttggttccatatgaactttaaagtagttttttccaattctgtgaagaaaggcattggtagcttgatggggatggcattgaatctgtaaattaccttgggcagtatggccattttcacgatattgattcttcctacccatgagcatggaatgttcttccatttgtttatatcctcttttatttccttgagcagtggtttgtagttctccttgaagaggtccttcacaataatgacaataataagaagaaatattcatggatcactagatatggtgaaatacaatcaaaggaaaattcatttcttttctactatacctttgtaactatcagtctttaaaatagttttattagaaaggcacagtcaccctcacgccaatagcagcttataaatacggggcaaggagcctggtgtggggaggctgagagataattgagagaaccagtagatatgaagctaataaataacactgtcgacgagaatgaggcagataagccagaggcagtgcaaatggccggtcaagacaggtagacagacagaagccaggagtgagagacgggaggtccaaagtgaatccatgggagcttacagcgggggggcggatgaagggaggagcatccaggtagaggggaaggaatggaggtgtgaacaggaggcaggagggcacaagctatttgatatatttggagagcgaggtgctttttttgaggctgagaaaataactggaagccaaaatctggaggactgggtagacaatgttaaacagcaagcacttgattctgcacgtgttggaagccagtgcagggcttctaagcaaggcagtgacatgaccacatcacattttaggaagggtacaaattaggcatgaccacaggcagtaagacccgagagatctcttacagtcagggataagagtctaaacgacaaggtggccatgaacattcaaagaaagaagactgaagagactttagagggcaggccccacgggacctgagtgaaggggtttgggagtctcacagctttcttctgtgaagtcaaggatatcacaaactatcggaatgaaagaaacagtcctagggctaggggtaggtggatgaatgtggttccattttgaacaagaagagaaaattcaggtaattcattttgattgatcaagcaaaataatttgcagctgaacattatagaagcaacaacaattcttatgatactggggtataggaaacaggctcaagaaagcacagtatttcctgtttctcttctgattcaataaataatattttctgttaaggtttttgataagtgttgttttaattaatcaaaaggagacaagataaatttgaacttaaaagcataagaaaatcagttgtctttttagaaaaggtgagtcagtatttcctatggtcttaaatcatccttcaaataatgatctatgaaacaaatgagatcctacttatctagccttttccttgataaattaaaaactgtaccaaaatcttactatattgcaaagacactagttcactcaattgagaatcctcagtatacaaacatataaatcaagggaacttaaccaatcattgtgttcaaaatgggaagattattccaaattttttctacatattttagaataatttcacagttaaacaccctgtagcttataaaatcattatccagtatttaataaagtatatctataacaatatcaacattttaatttaagagtttacaaagcacttttgatacatcacatttaaatgaaggcggcaacgagttcagtacattcatgcagattagaaaacagtagtttttgaagattgtattttttcatgtaagtcagaaggtttgaactatttcctactcctgctatgggtttaagcctaagaaacgttattcattatgatttggtctttaaataaatcacgaaggtagagagtagagcacaccccatgaatgcactgaggtgccgtaagtctccaacgccagaggtggcaggttggaatttagttcaatcacgaatttgttatgagaactctgacaaccttcagctctaaagtaagcttggaaacacaaagaaactctgcgaaaaatactgaacacagacacacacacacacactcctctcttttaagactggcataaaagatgtaagtgtaccaacaagcaacctccaaagagcaaatgaaacagaaaattcaaacgagtgcctggtaggagttgtaacttcaacaaagtgcctctcatatctgcctcataaacccgtactcatttttcacaactaactcacatagcaccccctcagtgacacctttcctgttctgcctaccagatatatctgcagacctagggtatcttctcgtccagaacacagggcatctcatacagggggctctatctacagggggctctatgctttgacaggaactgtgaacctatgggcagcagttttttcaattcatgtttgtggctctcattacaaatgtcctgcctcaggcacccagcaggtggtaataaatgctggttgaacattaaaaccttggaatgctgtatcattattctaaaggatagacattttttaaaacattttggaagttcttttgaaactgactttttagattatgaaaatatctcagtgataggttttgattttccaagttagaccttattttattttagaaaccgtcaaagttatacaaaaccaagcatgtgtctctgtgcattttgttttctctcctcccttaatggtaaggaaggatttcatctcttttataggccaaatgctccacaaatgaatgtgttaacaaatgaacaaattaataaatgacatgaatgagagctcaaactgcataaaagtatacttacttaaacatgagatgtgacgattgctaacatgtcataatcagactctgtcctgacttcagcaaaccacaactttgacaacaaagaggaaagaggatcaagtccctaaataccgcaggtgcactaagaccttcccacgtgcccgaagaagatacacttgcagaggagaaacgatgatgcagaggcctgctccgagatgcaggaggaagtttaattgcctgtgaatttgactggaatggcagtcaaacgaggtttgaaaggaaatagagattgttaaactactgactaggcgataactgccgtccttctcttctatctgtccctgttactaggcaataactgccttccttctcttctatctgcccctgtgactaggcgataactgccgtccttctcttctatctgcccctgtgactaggcgataactgccctccttctcttctatctgtccctgtgattaggcgataactgccctccttctcttctatctgcccctaccttgggccccaaatgactcagcactaaagtgccttgagcaggctccagcccaaaagtggcctccacgggcagcacttctcgctctgctgccctgccttgctttcctcctggcaggtaagaaagaaggaaggaaagaagaccctgaactggaatcatacacatcatcgcaattcatccacaccgcagtcctttaaggtttgtgccattgtactcagaaaactgaggctcaaagagattgagcaacttatctaagacctcacaggtcctgagagcagagtctggatttcaaacacctgggagactctgaaatccatgttagctcttctatacatgggcccaaaatgcagctgtacaccagcaagactgacttcctcttgcggcttatcactagctctgaatacaagaatcttcaaaatgctttataaacaatagtagcatcatgggaataagttggcaagttcccagaattactgttttagatgcacttgaactttttctccatgtatagagtcaggaataaggaaaaaggatccaaaggagaaggagaaaaataaaacgggactgagccttatacttcttgaccagaactgataatgttgggattttccttactttttttccagacaaatccaataaagacgtctgtttctgttacctaaaacctacttgaaaagtttgctccctcccaccttaagcggctttgtatagagcccacagttgaacattggttccaacgacaaaggttaatttcaaagtttttatagtattattcaaagcacgtttgatttcagccttggcaaccatgggcagaatgtcagcaatgctccctctattagctattggagagaaaacactgtgaaactctaagaccttggttattgggctaatgaaacatttatgccctgatcagatggagcaaaacttcggcagggttagtgagccaccttccaagtgtaccaatgaagctcttgcctgctgttacagataaatgactttcatttcactattggcttgtgcttgagaaggttattcaattgattccagttgtttgcaatgccttgaaggcaaataattttgtagcatccactgtcctcagaaaaaatacactgtttcttttctaaggaaggttgttttcataataccctagatatcaacagaaaatattccacttcttatcatatattaatttggctctggaataagtaaatgtaactaccagaatgctaattaggatgttacgctgatgtttatttgtgtgttctaatctgtagataaacaacaaggtctcttataattcatgattccaagtctcaggccacagcaggacaagtatcaaaacatctattctcaatttggagttgagatttctaaaaagaattctattttatccataatcataaaatagcaccaggaaaagtcaatatcttaaaatacagatcgttgaaaagtagatctttctgcccttaacataaacaaactgtaaaatctgaagttaaaattattccttgtaccagcctcctagtttacccagatttaccagaaaagttatagcagtgcatgaagctctgaggttttgatgggtgtagatatagacatccaattctgccatttcacactagtcagaataccagtcatagaaatcccacaggaaaaatcatttctgaaggtatctggtcttatggattataaaattaaactttcttatcattttacctaaaccgaaatatgcttcctatacaaagaagatttctttcaagagttaagaccacctcccgccatcccccttaacacacacacactcacacacacacagagatagagagagagagagagagaaagaaaattgagagcattagtggttttcttccttagactgattttttcttgctgttattttcagccactttgttaacggtggagttaaagggcaggatagatgtaacacccatttaacatacatgttgcaacatcagagatgctagtcttcattaaaaataccagttctaaattccttctaaaatatatttttaaaaatcagtacccttggtaccttggaaatgctgaaatgttatcatgaattctgtttatttgttatgagtctactgaatattatcttcaatataaactataatttactggtctgaacactcttcctatcttacctgtatatactctaagggagcaatttctcatgtttagcaaattgttctttaggtaatttgttctttagtttttttgtacaaaagtacaaaataattatcacaacaaattttccagtatttattattttgaagctatatattttggagtgaacttgttttttttttttccatgtcaggcttgagcaggatagcaaatatataaattgagctctctaattataatctcaatatatgaattcttgctaattaaaatactttgcacaagcaaaaacaattgccacgtatgtgtttaggaggtagttaagtaactctatataaaaataagtgcactttcccctcctttcttcagtgactagagaacttccatacttttaaaataatcaaataataatttagagagaaacagccctcaactctttgctggtgcttatcacactgcctttcttcactccattcttagctctgctagtttcttcttgtctgtaatgataataagggaatgtgggtgggtcagcacttctgtgtaggtcccctttccaaatttgccttccaaaaagccaaccaaataaacaaccaaaaaattgtgcaacaaaacacaaatagcattccaacatcttggtaagtgatgcattcacctgagattgagtggttttaggcggtcagtaacaaaatgtttctttgctgtcttagtagaaaggcaacaaattcttcaaagaaaccaagaaggttactaccttgacaacgtctctcattaccttcctcctcttatgtcttttctctccacattatctgttgtgtatctactatagaaggctacaaaacatacagcagaaaggatggcttgaaggcaattgatgtttgtaaataaattcacaacaaggtccaagctgaagaggtgaacacatcagccgggtgggacaattctcagcatgtgcaaacataggcaaattctagcctatgttacattgaaaacaatgtcagtgcattttttcaatgttaaagattttttcaaagctaaagcgtgttctttgctgtgctgaccacaaacaagtttttttttttttttttttttttttttttttttttttgagacggagtctcgctctgtcgcccaggctggagtgcagtggcgggatctcggctcactgcaagctccgcctcccgggttcacgccattctcctgcctcagcctcccaagtagctgggactacaggcgcccgccactacgcccggctaattttttgtattttttagtagagacggggtttcaccgttttagccgggatggtctcgatctcctgacctcgtgatccgcccgcctcagtctcccaaagtgctgggattacaggcgtgagccaccgcgcccggcccacaaacaagttttaagagtttcggaagtctggcaaaaatagaaaaaaaaaaaagctgaagcaacattgaaccgcacaatgtaagcattgggcatgcacaaattttcaaaacaaaggaaggaaatcatccctctctacaacgtggttaggctgatttttaagaaataaaatgtaagaaatcagaaaagcaaatgtttggcacctacatatccaatatctggcaccgtgcagagtagaagagtgaaagaaataatgaagaacaaagtggttactttgcttcaggagttcatgatctatagttagaaaccaatataaacattttgagtatatttcaaagaaagagaaaagcaggccgggtgtggtggcttgcacctctagtaataacagtttgggaggttgaggtgggaagattgcttgagctcatgaatttgataccagcctgagaaatatagtaaaacctcatatctataaaaagttttaaaaaaaggagagcaaaaacaaatacgaaagaaaacattagaaatcagagctcgggcaaagagttcaacgtgagcaaagcagctctgccctgggggacctctggagcatcccggcttcctgtagaggccccaccacatggccctttcccatcactgggaaccatcttctgtatcatgccaggaatttcccccaaacttctcaacctaatttattcagccaaaccatatatatttcttgaatccttactaaaagcaaggcactgttcaacttaatgaaaatatgtcaactatataaaacaaaaatgtttaccctcatgcaagttatattccagtgagaaaagacagatcattaataaaataaatatgtaaaatatatgatatgccagaaggtaataagtggcacagagaaaaattaagtttggaagagagctcaggaatgctgggagcaggtagatgtgaaggtagttagaatgctcaaggagggagtaataggcagaagaatggcctttctacatgtccatatccctatatggcaaaaaggacttatggatgtgatgaagttatggatcaggagatgaggagattattctggattacccatgttggccaatgtcatcacaagaggacttaaaagcaaaagagggaggcaggagagtctgaggcaagaagcgtgacagctagggtcagaatgatgtggttgttgcctggaagggggccagggtccaagggatgcaggcatcctttcaaagctggagaaggtaagaaagtgttctctctcccctagagagagtgtgtgttcttttaggctactagaggtgtgctaatttattccagcagtcatagaaaacttatatagataaggtctcactgagaagataacatttgaacaaagattccaaggaggtgagggcaccagctatgcagatatctggggaagagcactcgaggaagaaaaggcaggcaaacagcagggtgactagcccatgtgcatgaagtagagaacactgggagtcagaaggctaacaggagacaagtcagagagagggactggggtgggtcaactcacactcagcctcactggctattgtaagaacttcgagttattctgacacactcagtataggagagtctatgaatatttatagaaattctgaacgtttacaagatgaataaaagttgtatgctagcaaacctattggttgggtggggggaagcccagatttgtagcatttgctgatttccattgtgtaaatatttctactgatggtttgacaaacacttcataaaatttctgggtacttaattatcagctccagtagagcgctgtatgtatgacaccatatttgccaattccacattagattctattgtgaacaagctgtatgagagtcaactggtggcagaaataaggaagtcctcaataaaaatcagcatttacttttgacagatgtgagattctggaacttatttctctttacttgctctgcctggtgattaaattatgattttaaaagaaatagttttaatttcttatcagaatgctgccaccaaataaataaaatatgtactttaactatatacaatcttgtctatattatactcttgtcaacagaaacattatcatgggccaacttcatgaaaggagatatgtgatagaagatggagttgttggaatggaaaaaaaaagtcaaattttactatggattaatcagagggaagaaagcaaacagataggaaaggaaaggcagacttagccaagtcgaagaggctgaactcaggaggcagtgggagaataggatcatagtttgaagagagctgcgaggctgtttagtccaggtgaggatcataatcccagaagacccagtcacaaacaccataacactgaatgttgaaatcctgaaagattaaaattcctaaggtctaaattctcttttttttaatagagatatagtgaatgggttcattttcatgctccaaataaaaacatacacgagcctgggtaatttataaaagaaagaggtttgattgactcacagttcagcatggctgggaaggcttcagaaaacttacaatcatggtgaatgcaaacaagaagcaaggcaccaggaggtgctgagcaaaaggggaaaagccccttataaaaccttcaggtatcactcactgtcatgagaacagcacgggggtaaccacccccatgattcaattacctccaactgggttcctcccataatatgtagggattatggaaactacatttcaaggtgagatttgggtggggacacagccaaaccatatcattctgccctcagccccttccaaatttcatgtccttacattttaaaacatgatcatgcctttctaacagtcccccaaagcctcagctcattccagcattaacccaaatatccaagtccaaagtcttatcttagacaaggcaaggcccttctgcctatgagcctgtaaagtcaaaattaagttagttacttcatagatacaatgaggatataggggtcagtcaaatcttgaagctctgaaatgatttcctttgacttcatgtctcacatccaggtcacgctgaagcaagaggtgggctctcatggccttggacagctccacccctattgctttgaagagtacagccctcctcctggctgctttcacaggatggtgctgagtgtctgtggcttttccaggcaatacagtgtaagctgtcagtgtatctaccattctggagtctggaggatggtggccgtcttctctcagctccactaggcagtgccccagtggggactgtgtgggggctctgaccccacatttcccttctgcactcactgccctagcagaggttccccatgagggtaccgtccccatcacaaatttgtgcctgaacacccaggcgtttccaggcatcctctgaaatttaggtgtagatacccaaacctcaattcttgacttctgtgcacccacaggcccaacgcctcatgtaagctgccaaggcttgggccttgtaccctctgaagccatggcctgagctgtacattggccctttaaccatgattgggacacagggcgccaagtcctgagactgcacagagcagcaagtccctgcaccgggtccattaaaccatttttttcctcgtagccctcctggcctgtgaaggtttgagttgctgtgaaggtctctgacatgccctgaagacattttcccattgtcttggtgattaatatttagctcctcgttacttatgcaaatttctgcagctggcttgaatttctctccagaaaatgggttttccttttctatctcataatcaagctgcaaaatttttaaaagttttatgctttgcttcctcttgaacactttgctacttaggaatttattctgccagataccctaaaccatgtctctcaagtttaaagttccacagatttctagggcaggggcaaaatgccatcagtctctttgcatagcaagagtcatctttactccagttcccaacaagttcttcatctccatatgagaccacctcagcctggacttcattgtccatgtcattatcagcattttcctcaaaacaattctgcaagtctctaggaagttccaaacttcctcacatttttctctcttcttccgaaccctgcaaactgttcaaactctgcctgttacccagttccaaattcacttccacatttttaggtatccttatagcaacaccctactacctcagtacacatttactgtatcagtccattctcatgctgctaataaagacataaccaagcttgggtaatttataaagtaaagaggtttaattgactcacagttcatcatagctggggaggcctcaggaaacttacaagcatggtagaatgcaaaggggaagcaagtcaccttcttcatgaggtggcaggaaggagaagcacaagcaaagggggaaaagctccttataaaaccatcagatcttgtgagaactcactatcatgagaacagcatgggggtaactgcctccatgattcaattacctcccactgggtccccatcatgatatgtgaggattatgggaactacaattcaagatgagatttggttggagacacagccaaaccatatcatggggtctcaatttattgccccggctgatttcaaactcctgggctcaagtgatcctcctgacttggcctcccaaagtgctgggaatacaggcatgagccaccatgcccagtcctaaagtctaaattattaacatctaaaatccagaaaatcacaatcacaggagagttgtaccaagttagttgcatcgtgttaggtacaactgttgctttgttttctttttatttggaaattatgtatggtttaaggaggtccatatgggtgtcaaatctgcaagggatggacttgcaggcttaatttcaggtgtcaacttgactggattaaggaatccctggaaagctgggaaagcattattttgggtatgtctgtgatggatttctcagaagagatcagtgtgtgggtctgagcggactaggtggggaagatctgctatcactgttttgaatgtcctgaatatcacagaagaagttaaaatgaaagtaaaaaatgcacaaaatcttgtctgccaaattatgtaatcatgtaccaaacacctctacaggtagcatcatgcttgccttcacaaaatgccttttgtgagataataaaaatacttcaaaaaattcagtggtcttctgagccagacacctcctggcacagagcttcctccagtgctacaagacatattaaatcatgaactattcttgattagggatttgactgtcaaaaaagataaatatgtttatttaccactaaatttaacataacaaaactggtgcctgtttcactttggctgatgaacggcactttcaaaactgtccccagtgggttttttaaatcaactttatacagtttatgccccaattggattacaaaattctgtaatttaatctgcatgtttatggtttaataactggaaaaagtgaagtactttttaaaagcttatttgaagatttggagggctttgcagaagaaaatagatttcaattggatcaccaaattataatgacaagtttttaattaggtgtgatcaaggcttctaaaagtgaaatgcaagttgttaccagtaaactttatatcttccattcagcccagctcatttgccagaaaattcaggtgagtggattgaccaggccatctggcaatgatgaaaattttagtttaaaaatgtgtcatttgtctgtattggcattccttccacctgataaaattccaggagcttttgataaattaaaaccacaattgcctgaagaagacagaaatattacatactggtttgaaaataatgatgtgcaaggtgggataagaagtcatttaggcaacggtgttgctgttcaaccaagagtattgtttctgccaaatgagtggcctgtatatgagggcctgcaaaatggatttcctcatactcaaaacaatagacaagaatggcatagaagattggaaaatataataggaaatgctcatgtcagtgtgtatcaaattatagaagaatttcaaaaagagcagtgccacgtagaaaatgaatgtgaatgtattttatgaggagagtcaaatcctaaaaacaaaaaaggcaactattcatcgtgatgcatgacttcaaaatatagctaatgatcatgaaagtcagccatctatgatgaactctgcaattgcccataatctatccatgtaatatactttttatgtgtcaattttctttttagttgtttctttttccattttttccactattttaaattgtcagcattattttttacaagttgctatgctgtgtatttcatcttagtatcatttccaatactggaggtataaattttgcaaagacttttagagagttctaatttgttttatgcgttttttttttttttgcaaatttaactccacaagagtgcattatcacaacactgactttatgtgtaagcattgtacatgtacataaaaacattaaagtttcctcaataagtgagaagatatcctttttgcacatttgcatttgggaaagagaaaattcctcaggatctcagctctttgactgcatattagatggtgacccatcccagcttttgatgaatctggtcaaaagacttaggttgtctgtcacaatattccagatgacctaagttataaagctgagtgcacccagttaccaaccatgcttttatacattttgctttttgacccatttctttacaactcatctgctcattaccattatacccgtgagactatcattagcatatctgagttttatgcttgcaaatatacgtatgttattattgcctattgattgtgtaaagtggcctaggaagcgttccgttgtgtttttatacgtttctcaaataaattccatcttaaaaatataaataaatgcttttttgttgttgtttttagacagagtctcactctgtcgcccaggctggagtgcagtgttgcgatcgcggctcactgtaacctccacctcctgggttcaagcgattctcctgcctcagcctcccgagtagctgggactacaggcacccgtcacgatgcctggctaattttttgtatttttagtaaagatggggtttcaccgtgtcagccaggatggtctccatctcttgaatttgtgatccacccacctcagcctccaaaagtgctgggattaaaggcatgagccaccatgtgctgcccaataaatgctttttaaagaatgtgttaataatttttttccagaattgtatgttcagaattttgtttttttaggattgtaattttcaggattttagactgtacagatttagatcttttgggacttcaacatatgggattacgacgtttaggattgtgttttcctgggctgtggcccaaactcgtgtggtccaacactatttcacatgagaggaaagcaaaccacgtgcacagatgcaatgaaggcttaaataagcgtcatgtatagattatatcccaggaaaacatgattaagatgatacatagcgacttttttttccccagtgaaaaagatccacattctttttcttgtgtggaattaaacacaatttctgaatcaatgtaagtgaatgcaaatcaccacgttcacttagctgatgctcctttattaacagggatagaaaggaggtcattcgaagagatgatggcatgggacccaggacctgaggaagctgcagtgggtgaaggggagaaacagaggagcaggggctggagaaagagtggggagtcatcaaccaccctcctttctcctggcatctggtgttcggagcccagaggtcttctctagggcctcggagaagcttccaagtctgttcatttatctttccccacccctgcttgtatcacaaataaagaaattattgacaactgagttcctgactaggtggcaggattttagggacccttcacctcgtctgaaactcatgaaggtagtgggaatcccatgggttagttagtaacagtccctgagattatttggtcatataaataatcagaaaactcatagtcatcttgcttttctcataatgcccagctgggggatgttgggggtagggaggactggagtgagaagagacagaaccagagctggctttcatgtatggggctctccagagcaatcaggcctaagtacaaccaagaagggtcttgaagccactctggcaagggcagcctggtctcagaccccagctcacaccaagcacgtcacctgtccgactggaaagcttaaacaatgtgtttctgtttttgcttttgttttctggtaaagaattcaatgccattagctacattcacaatgctgtgcaatcatcaccgctatccatttctgaaacattctatcatcccagacaggaactctgtgcccattagacattaaccccgcccatttccacctcctgccagtcctgaaaacctctattctactttttgtctctattaatttgcctgttccaggttcttcatatagatggaatcacgtagtctgtgtttgacgtctcacttagcataatgtttttaagttttatctatgtggtagcaagtatcagaattccctccctttttaaagatcactaatattccattttatgtctataccacattttgtttatcaatctatccctcaatagactttttaggttgtttccaccttgtggttcctgtaaataaggctgctgtgatgctgcaatgaacacaggtgtagcaggcaggtgtggtggcatgtgcctgtagttcctgctactaaggcatctgaggcaggaagattgcttgagctcaggagtcctgggctgcagtgtgctgtgttgatcagatgtctgcacgaaattagacattagtacagtgacctcctgggataagggactaccaggttgcctaaggaggggcgaaccggcctgggttggagacaaagcagggaacaactcccagtttgaccagcagggggtcatgcctgtggacagcgacgcagcagggagatcctgcccgtggacagccccgcaacagggagatcgtgcccttggacagccctgcagcatggggatcgtgcctgtaaacagccccgcagcagggtgtcatgcctgtggacagcccctcagcaggggttcgtgcctgtggacagccccacagcagggaggttgtgcctgtggatggccccgcagcaggggatcgtgcctgtggacagctccccagcagggggatcatgcctataaacagcccctgcactccaggctgggaaacagaatgagaccctatttatttaaaaaaaaaggggggggtggggtggggagagaacacaggtgcacaagtatctattggagtaactgctttccattcttttgaagatagatataggtagataaagatacagatatagagatttatagatgtgagtgggattactgaatcatatggtattgatgactgtaggcagctcagggcgcatcctcggccccggtgctgtctttcccagagctctgtttaattccatcaggcacgggcagcatttggagaaagctgtgttgatttttgtgatcttcagccagcacagaagtggccagttccctagcctcccagcacggtccttctcctgccctgccccttcatggcctgcctgggctcactggacccagacttgcctttcacccctgtcaaataaggggtgcctttggtagggaaaggcagacgacaccaaataagactggttggagaggggatgagaagcgtcaattagaaagctcttcaaattcaaacggactgttcaaaccatcctaggactagactccaatcgggaaagactctgaaggaaatgatctcctactcccatgagatggctaacgtgatttaggtaaaaagcttttagttttatggctggggaggtagcaataaagaaaatgaacctcctgccagtaattctttttcaagctctgccaattcctgtgtctggggaagctataaagaatgtccagcctcatatcaaaagaattgccacagatctccagctcacctgcattcaagcattgaaacatccctaagcctgttcccaggccagcctggaactgagaatccaggagagtcttttctgttctgctgctgcagctacactatctacttcttagcataaccagggccaccagcaacacatgctagagaaatacagagagcaaaaatcaacagctgatgaaaagcagaatcttttctttttgacagcaataccaacagcatgaagcacgtcctttttggagctttccaaaccaattcaaaagcgagttttctggcgtggatgaagaaagctagccaaattgcccctgaatgcatagccactggccaagatattgatgactgtaggcagctcagggcgcatcctcggccccggtgctgtctttctcagagctctgtttaattccatcaggcacgggcagcatttgtagaaagctgtgttgatttttgtgatcttcagccagcacagaagtggacagttccctagcctcccagcaccgtccttctcctgccctgccccttcatggcctgcctgggctcactggacccagacttgcctttcacccctgtcaaaacctcacagtcctgtgtgtctgtttccctttgaactacacaaactaaccaatttggtgaacctattaagtgaacttttttatactcatggtctagagtgcattgaacgctaaagggtttgctagaggttgtcacaattaattctgtcttcttccaactggaccaaggcttctttgagttaataaaactctgagaaatctgagtggatttttcatagtatctctttctagtcttttggggtttttttgttgttttttacttttcatggagattttccttaatttaacccaaaagatatacccatatgacatttgaactaatatgaaagaggtagtaggacaaataatttggagacagtctttcagagccccacaaagtacttgaaatttatcaataaacccctcccggtgcttcccaccatgttccacattccatctccattttaagccatgaagcttcaagtggcatctcctcctgtgaaacctacagtttggaggtaaattattgatgactaatgacttagaataaccaaagaaaggatcatctagtggagacacagcatggaaatggtggtccagggtgagacggaacttattccaatcccagtgccacctatgtggttccagctgtgtgcttcccttcctctaatcttgtttactcatctctaatacgggactaataacatatacatcagactattgtgagggttgaatgtaacgatattccaaattgttgcatgtgtccagtacttaacatggttccaagaacaaaacatgtatcaataagtatgaatagccttcccagtgcacatctccaaacagtggatttctggccgatgacaagtagtggttcccagcggtcctacaggttatggtttaacttaccactagccaatcagtaagtttgcctcagaccacatcacaattcttttgcaagcctggagcttggtgaaaaacaaggggggaaataatcaatgtccctaaggcagatgctgaaagattaacctcataacataattctctcaccagacttgtttcctgaatgtctatttaaattttaacactgcaaataaaataaagttggtaatgaaggtgattaagatggtatttgtccagggaacgaatctcctcacaacatacctaagaaagagatatatgtacagaaaacgaagcacagtaaaatatcacttcattactatcggagattttccccaaacacagagaaagctctacagagctgagcttaagccagaactctgttatttacttggtgtaatgccaaaacaggccagagacccctttcacctacttctctttaatcccaaacccatgtctctctttgatctaagaaagagccaaacgcccaggaggcgccagggtagagaaaagcagccagccggagagcggcctccgggccaggggagtgtgtctgagctttgttttatttttcttatttgtctgtagttgtgtgattggtagaagagagtagatatgaagtctactgacacaggattggtcttcaagcatgtcttaccaagcatttgggggaacagaggggttccacaaataagagagcaatgatcagacttccttctaaaaggagcagccacaagctaccttaactctccaacttgcccattaatcttcacctagagttaggaagatttcaccattagctgtggcccataaaagatccttaagcttgaccaaccacagaggtccatctccttgaggaggaagtgaaaggggtatggacagaagctgtgagctttctgtcctccgcaggccgccagctatgtcttctacttattgtacaagatagtctctaagtgatgttttctggctgacaatgccacataactgatccttatctcactatggaaatgaaagatttcaaagaatttgttgcctgaaatatggtgccctaatcatatattaataaagctgctatccagaaagaaggcagatttcaaaagaaaggttgttagcattctcaggtacctaaaaagtatatattgtagaacaatggtaagtagatcttggaatccggtagactttaattcaaaccccagctatgccacttattaacttatgtgacattgggaaagcctctcaaatttagatttgcaaaatcagaataatgtaagtagccaacaaatagggtttaatggaggtaataatgaaggttattaagatgataaaattaaacagtgaatataaagtccttagcatttaataaatttattgtatgatttcaaagcacatgcttttacctacagtgctataaagctgcttgcaatagtcaaagttaatagacgctctcgtcagagctaatagaagccttgtatatgtaattatttaagaattctgtaaatatacacaatagggtaggaatgagaaaatctttagaggaaatattcaagtatgtttgatttctagcaaatccagatagacagttttggcaacaaaaaagtcataattttaagtcttgttataggagctataattttattcaagggacaactgatttgattagattagatgctgtgcactgcatgtttccttcaacaaatgcacaagttgaaactctaacaatagaatggcattagaaggaggacctttgggaagtaatttggttttgatgaggatggagttcccacaatggggttagcatcctaataagaagagtaggagactagagccctcttctctcagccatgtgaagatacaacaagaacacctgcaaaccagtaagagggccttcaccagacactggctctgctggcccagattttaatctttgaattcccacaactgtgagaaacaagtatatgctgtttaagccactcagtctacagttgtttgtggcagcagcctgagcagacaaagacatagggttccttttattttcagaattcggtttagctgtaatcacctaccatcctgagatgctgtttcctcccttgaaatataagctctgggactatagcttcatggacaaattctgaagaatttgtctctgttcttgtgggatgctaaactaaccaatcaaggaatgtttgctcaatggaatgaaacatcttaatgcagctcgccagccaatgtctgcagagcacacctcatgggttctggctggcttgaatttctgagactacttcatcctaatcatcagactgtggactcagattcaaccaggaggcccagattctagcgtcagttttgcccttggggtacaaatgcacgtcctgcttcactgaacatgaaaccctgaatatttggccattactctggcagttgtcctctctccctgtgccaattgccaatcaacccaactcccaggcagccttggcagttatgtctgcttggcctgctgtagcagccaatgacttagtaaaagtcagaacagagatctgctacctcccagtccaggatttccccataactcgcccatgtttatattaaacaactaggtttgcttttaaaattctttttcatttagcctcttcttagaacttatcgttttgagaatcctgacctgccaatattccataactttctgaaagtggcacagcaaatacgatgtatgcacactgctaactgcagctgatttctttttccatcatctataaagcacattaggtaatttctaaaccagcagcaaaatctatttataaagaatgctgatttgttttctgcactttccaacacagagcttcaacttatttccttaccataaaaaaacattactttttaaaacaatcatggttagtatattttataaatgctttaatttttgtaaagtccaacttgcaaatcggagtgtaaatagctttcttaaaattgaaggaactgtgttagacccagtatgctgattgattatttcactctgcttcaaagcagacgatttcacagacattgggtatataatgtaaggagtttttataaagcaattgatatattgatatcattaaaaatataattataataaataaaattatagggaaaaggaaatcttcattctgacaataccaaattttttaactaactcattgctaaaagattatgtctctacatgaaaaattttacacattctttctatgaaataaacctgataacaccttgaaaacttaatagttatggaaaaggaactactgtgactttttttagagaatgtcatgttcttgatgttcttgagtgagctgtctcatgttattagaaaggaaacagcagcaccttgtggacaaacagtgaatgaatttttaggacccggtgcagtggttcaggcctgtaatcccagcaccttgggagacttgggcggagggtaacttgagcccaagagttcaagaccagcctgggcaacacagtgacatgccgatctttaccaaaaattgaaaaatttgctgggcttggtggctcatacctcaggtcccagctacttggaaggctgaggtgggaggatcgcttaagcccaggaggtcaaggctgcagtgactgtgatcataccactgcattccagcctgggtgacacagcaagaccctatttcaaaaaaaattatatttatgtggcactttctacaaggaatatagtatcatgtttgtatttaaatgacatcaggaccagcatggtggcttacacatgtaatctcagctccccagacggcggaaggcaggaggattgcttgaggccaggagttggaagaccagcctgggcagcataatgaaaccctcatttctacaaaaataataatagtaatcaaaagctaggcgtgctggcacatacctgcagacctagctactgtggaggctgagtggaaagataacattgagcccaggagtttgattgtattgtgtattgtgagctacggcctagccactccactccagacaacacggcaagacccagtctctaaacaaaataaagagacatcagagcattgtttatagagatttataaatgatcccaaaatgtcttcagagagataaatgatctaaatatagctatatcgactcttcttaaattccaaatttgggtgggaacaataaatgagatagaagacttcttgaaatgtatcaagactcagaaagacaaaacaaaaactttcattaggcagtatcaagaatgttcattaatgctatttctaatttatgatacgatcatctaaagaggaaatcccagcaacaagaggccaaaggaaagggaaaataaatgaaaacaaggaccatactttctccacatccaacctcttctctaccacctctcagcaagacctcccacacccaatcactgctttctcttgcggacttaccctctactctgtgaacacatgagccagagaaccctgagaagtccctgagtcccttccaggggctctgcaaggtcaaaagtcttttcataaaaatacacaggttttgtttaccttttccactttccttgtctctcaagtataattggagtttcccagaggctacctgacatgtgatgtcaaaagaaattaaacgtagaagtagaaaggagaacaagttttcttctattaaaccagacattaaagacatacctaaaaatataaaacaatgtcactgttctcacaaactttactgcttaaaaatgataattttaaataaaaatgtgatttatgtaaacatataaatatatttttttaatttctcacttttaatgtttactatgataaatatagatagacataatccaaataaataaaagctctttggggtcctcaataacttttataaatgtaaagtgttcctgaaaccaaaaatttgaggactgatgcgctaaatctcataccctttgttgtagcttccacccaggtcatttcttaaatacttgatcaataatttccccatgtccctcaccctatccttgttgcaaaattccattttcctactccagccctccctgtcatgagaaagttcccaggttttagacatgatttactaaatctttcttcacagctttatcatgataacatgacatatacaaattgtgtaaatttaaggtaacttaatgttttgatatttctatactttttgaaacgatcaccacaatcaagcaaattagcatattatctctatatatttaccattgtgtgtgtgttgacagtaattaatttatgatctagtcctttagcagaacacaagaatatgatacagtgttgttccacgttgtacattatatctccagaaattataacttgaacattgcacaatttaattaacatcaccccatttcccctccctgagcccctggcaacctctgtcctattctctgttttcatgaatttgactgttgtagattccacatgtaagtgagatcatgaagtatttgtctctgtgtcttgcatttttgcttggcgcaatatcttccagctccatcaatgttttcacaaatagaagtatttctttcttttttaaggttgtataatatttcattttatgtatacacgtcacattttctttacccattcatctgttcctctgccaaaggaccttttggttattttcctattttggtcattgtgtgtcatgccgcaatgaacagaggatgacagacacctctctaagactcttatgtcaatttcactggacatatatccagaagtgaaattgttggattatgtggtagttctttttttcatttttgaaaccgggtctcactctgctatccagggtaaagtccagtggcaagatcatagctcactgcagccttgaactcctgggctcaagcaatcctcctacctcagcctcctgagtagctggggctacaggtgtacaacaccatatctggttaattttaattttatttctgagatggggtcttgctatgtttcccaggctggtctggagctcctggcctcctgccttggcttcccaaaatcctgggattacaggtgtgagccatcaaaccaggccagtgctattttcaattttttttggaggaacctcaatactgttttctgtgttttactaatttgcattcccatcaatagtgtataatggtttccttttctccacattcttaccaacacttatcttttctctttttgataatagccattttaacaggtgtgacatgatatctcattgtggttttgatttgcattactctgaagtttagagatgttgagcacattttcttatacctgttagccattagaatttcttcttttgagatgtatttatatacgttctttgccttaaaataaaattagtttatttatgattttggaattgatgtgtatgtgtccttcttattttttgaactccttataagagatatggtttacaaacattttccccatttcataggtggccttatcatttcattagttgtttcctttgctgtgcagaagcattttagttcgatgtatttcatttatctattttgcctttgttgcctgtgcttttggcatcatatctaaacaaattattgccaagaccaatgtcaagaaggttttctcctgtcttcttccaggagttttgtttcagtgattacatttaaacgtttaatccattttgagttaatttttacataagtcatgagctagggatccgatttcattcttttacatgtagacatccagctttcctaacaccatttggtcaagagcatatcctctgcctatagtgtctccttgtcaccttccagggtgatcaactgctgcaaatgtgtgggttatgcctaggttctctattttgtttcactggttcatgtgtttgtttttatgccaataccacagtgtttttctttctacagctttgtaatttaatttgaagtcaggaagtgtgatacctgtagctttgttcttgctcaaaatagcttcagccactcagggatttttgtgattctatatgaattttggtattttttttctatttctgtgagagataccattgggattttgatacggattacattaaatgtgtagattgctttgagtaatatggacactttaataatacagtactaactctttcaatccatgggttgtctttcaatttactttggtttaaatttctgtcatcaatcttttataatttgtagtgtttaagtctttcatttctttggttagttagttccaaagtagtttatttgatactgttttttaaatttccctttcagacaattcattgttagtgtctagaaatagcagtgatttttgtatgccaattgtgtatcctacaactttagtaaatttattatatagtcagtcctttatatcaatgggttctgcaaccatgaactcaatcaaccatgaacctaacttgtacatattttccatctgtggtggtttgaatccaaagatgttgacccatggatacatagggccaactgtacacgattttatgtgaaggaattgatcatcacagatattgttatctgaggggttcctgaaacaaatccccagcagatatgaaagactgactgtattatttctaaccattttctgtggagtctttagagttttcaatgtataataatcatgtcttctgttaacagaggtaactacatctttcctttcaattttgatgccttttatttctcttgcctgattgctctggctaggacttccagtactatgttgaataggagtgatgagaatagacatccttgtcttgttccagatattaaataaaaagctctcagtttttccccattgattataatattagatataggtttttcatatacagcctttatagtgttgaagtaagtttcttgtatacttattttgctgagttttatcatgaaagtatattgaattttgtcaaatgtgttttctgcatctattggaatgttattttggctttcgttctgttaatggggtataccacattattaatttttacacattgaaacatccttgtatcccatagataaattccaattggtcatggtgtatgaccttttcaatatgcttttgaattcagtttgctagtttgtattttttgagaatatttgcatctatattcattaaggatactggtctgtaattatttttccttgtgttgtcttcgtctagcttttaagtcatggtaacatcggcctcatgaaatgagtttgagagtattctctcttctattttttctgaaaagttttagaaattttggtgttagttcttctttgaatatttggtagaagttgcccatgaaagcatctgcacctgggcttttctttgttgggaaatttttgattactggttaaatctctttgcttgcttttggtctgctctatttcttttttgttccaccttggtagattgcatctttctaagaatttatccatttcttctaggttatccaatttattggcatataattgcttaattatcctttataatcatttgtattcctgtacgtttgttataatgtctccattttcatttctgattatatttacttgagtttctctttttttctttgtgtagctaagggtttgttatttttgtttgtatttccaaaaattcaactctagctttgttgatttttccattgttttttattttatagttattttatttatattctaatctttattatttacttcattatgctaactttgggtttagttagtttttcttttcctaattgtttatttgtgaagttaggttgttcgagtgagatctttcttattttttaatgtaggtatttatcattgtaacatttccccctcagcacttcttttgctgcatcctgtagttttgttgagttgtatgttcatttttgtttgtctcaagatatttttaaaattcccttttgatttcttcttttacccaatggtggttcaagagtgtgttgtttagtttctgcatttttgtaaatgtttctgttttctttgttattgacttctaattttattccattgtggtctgagaagatacttggcattatattaaacttcttaaacttgtaggatgccttgtgacctaagacttgatctatctcagagaatattctgtgtgcacttgagaagaatgtatattctgctgctgttggatggaaagttctgtatatgtcagtgtttaatctactgtgttgttcaagtcagctgtttcctctttttttattcctgcctagatattctatccattattgaatttggggtactgaagttggctactattattttagtgttactgatttctcccctttgctttgctgatattaacttcatatatttaggcgttctaatgttgagtggatatatatttacaatcttcccattgaagtgaacgtttatcattgtataatgaccttcttagtctctaatgacagttttttatttcaagtctattttttctgatctaagtatagatacccttgctcttttttggttaccatttgcatagagtatcttttcccatccattcactttgagcctctatgtatctttatatctaaagtgactcccttataaatatgtactgatgagtatcttttatgcattgtgccactctatgtcttttaattagatagtttaatcctttcacatttaaagtcattgttgataagtaaggagtaacttgcattttgttaattgtttttcatatgttttgcagttcttttttttcctctcttgctgtcttcttagtttggttatttcttgtagaggtttggtttcatttatttttcttcacattttgtgcatctcctataagtttttaatttgtggttgcaaatttacgtcttctatagaaagctatattaatgttatcagcttttttggaatcattttctttctcttccctcttcagacatatatgcaaatactctgttgttcaagacatgagtaaatagagctctggttagaaatttatcaatatgaaaaaaaaagatcctctgagtattttgataagttagaaaataatgatagactgcggtagaatgtcatgtatttcaacttctgtcatctatgttactctacaatatattttctttgtgtattagtcaatgttatatatttacaaggtaaatccataaagcatacattctagaatgtcctaacttatgttcttaagagatatgctccttatggccttcttggcactcctgaagtgttaaatatttccattgaagaaggttgtatatggcttctgagatgaagtctagacaggttaggattattttttgctccttttgctcacacagcacccactgtcccctccctttgttattagccattatctgataccctagatgaagccaccttctgtccttcagttttcacgtgggggctgatttcacccccagtttcaggaataagcacaggacagctactaacaagtatgttgttcactcaaggaagaaacccagctaagggagaaaggggggttgaaatccagcctgcatgctcttctccaagccacatgcaccgatacaaggctgcatctaactggagaaaggggagccattttctaatacttgcaaagcactgtgtggacagtggaaaccctgtatgagctcgtgacacaggcctggccaatgaatagacttctaatcctggcacagatgaaactagagatggacatgaaatccaagcctcacacccaaagtcaatctctagtctcttattgaaactattagaagtgtttctgtttttgctttattctggggctatggaactaaggaaatgtaaactggaggagtgatgatggccacattgcagcacaaagggaaaacttgtctgagagtaaaatcaatggggaagaaaaaagcaaggaagaggagaagagccaagccctgagttcctactttcagccattctgaagctataccctggatttttccattatacgagtccacaaattaatattttttttggcttagaacagtttgagtttgaattctattatttataaccaaaggattcctaccatattatcttagccggattttcataaacagggtatatgttgatcaacaaaattcctaaatgtttcacgttcactccaaagagtgagggggaaaaataaagaagaggaagaaaatgattacttatcatccacagtagtcaaggaagctgcagaagcatcaagcaaaagcagcagaagttagctttgtactcccacaaaccctgctctgaaatactccgcctagtggctcacagcagaaactgcatttctaaaatctttaaaaagccagaaaaggaatcaccacttaccctgggaaccctaacagaggagcaggccacataggaatatgtcccattggtttgaggtcgataagtccattttcaaagctttagtaattccagaaacaagaacatatttattttactttgatcacacaatgcctagttatattaaaagtaaggagacattcaataaataccttttatggaaataaaaacagacaatttaggagaaaattaactatcaacgcattattttcaaaggtaaagaaaaaagaaattattctgaacacacaaaacgattttatcaaatatcatggtaaattatcattatatactaggtcacttaataaatttccagagataattggaaagagtttccacaatagattttgtttcaccccaggaagaattttcacaaaaagttagttacttatctccattgttactagtaccaaactaatcctatgattctgagtcaaattacaaataacgtccacacttttctccagtgagatcagaggagatgcctaagtggagtgtgttttaatgtgagggcataattggtttatacttttcactgaaaataacaaattctagacaacttaagcaaaacaggaattcaatgaaaggatattgaatagttcacaaaattattgaagatcctggagaagcaaggtaagaactgagggaaactcagcatagccaagttcattcgacggaagcagatcttgggatgtcaccactaggatgctgtcatttgacacttgtcaccatgtagctgggctctgctgaacctaggcacttgctgccacattcctggaactgcatctctgctcaatttctcagaatcatctctgattctttcaggtcttttgcatcatttcaccgggttccaagttctaataaagagccatcagttggctgggcctagatatgtgcccacacgtgagtggccaagaaactggaaaaaggatcatgcactccctttcagcttttgtaatggaaggtggggcctgtcctcatatttcgcttggggttcaaaaaactaggaagggggttttgttgaaatgaaacccaaaactatagctatccatttatagcaccttatttgtacaggaagaaaccatgagacataacgtataaaagtgcatgggaggtctaaacatatgaggggttttttaaggagagaaagatcatacttgattggtgctgtggtttcactgtggctcctccgagattcagcgttgacaatgtgatagtgttgaggtggagcctataggaagtgatgaggccatcaggactcctacctcaggaatgggtttaggagccctcatgaaagagctccatggagggatttcatccctcttgctctcccgccttccaccatgtgaggaaacagtgttccttgtctctggaagatgcagcatcaagacaccatcttgaacggagagaacagcccttaccagacatcagacctgccaatgccttgatcttggacttcctattctccagaactgtgacagataaacgtctggttttcataaattgcctagtctgtgttattttgttataagagcataaattgactaataattggagattagaaaaagttttttgaagtggcatttgagaagggcttgatagataagatctctacaaatagaaatagagagatggcttcaaatcacccaggtgaaaggaataacatagccattttcagtatgaatgcaaaatggagatggtaaaatgtacataggattccaccaccagtgggaggacagaattgtaatgtggcagcaatctgtaaatataatatttatcactcattcacatttatttagagtctaatgtgctctaggctctgaaattaagcaaagaaaatctagatatgcataagtccaagactttgcctttatgacaatcaaaataatgaccccataaagatgttccagtccctggaatctgtgaccatattactttacatggggcaaaagggactttggagatgtgattaacccttgagttagggggattatccttgattatcttgggggccaatctaattgcatgtgtctataaaatcagagaatctttcctagctacagtcagaaggtgatatgactgcagaacaatggtcacagacatcccacattactggctttgaagatggagggattgtcccatgatccaaggaatagggacagcatctaaatgttggaaaaggaaatggattctctctagagcctccagaaagcaatacagccctgacaacaccttgacttaaccccagtaagaccactgtcagaggtttgccctacagaagtatagggtcgtaagtctttgatttaagccacaaaattgtggtaatttgttatggcagcaatagaaaattaattttaagaactttattatttggaagataggcagaccagaaaatccaaattataatataattcgattaaaagctatggagatttgtgttaggtgttttagaaaagaattgagtattaacaagactaacagaagaaatgttctaaaatttacacactaagtacatcacatttttctaatgatcacgttgatagagcatcttagaatccatggttttaacaaaccaacaggcttatatacataaatataaaaatattatgtatatatataatatatggaatagccccatgggcacgggcagccctgggtcaaagggcagcactgtactagcagcccacaccccacctcacccgcctaccctgagctgacttgtctgctaaatgctaaatacacctgtcaaccggtctggtttaactaagaagggcctagatgcaacaagtctgggggctgtgactgggggaagagagagcacagacggagctcctcctccttctgccactgcctaccaactgaaaaccaccacctgaagcttgcttagattctcagcctacaccttgttcccaacaaaactcattcaatacttgggctcccactacaatctctggaactaaatattctacggatctgctttttgagctgcaacttatcttactaaattccaagaagcttatgtaagagaaaaccaccagataatacaagattttcaatgtgatcatcattgctacttttaactagaaattatccagtaaatgtattgtgaactgctttgtgactatgctgatttatttagtctttctgatccttggtttgattatctcaaatatatgagtatcaccaattttataaagttgctgtaaaaattaaatgaaagaaaaataatcctccgtctccatatattgaatactaacaaaattataggcattgcgtccaggtttttacatacttacctgatagaagtctcctgacaaccctgtattttaaattacaagcatttgccatgatttttacacatgtacgttatggaagcctcgtaacaatcccatcttttatagatcagcaaactgagcctcagacgagttaaaaacacgttcaccatcaaatcataatgagtgatggaactgggattcaaatccggttctctctgatgccaaaaattgtgcaatttaacgaggaccaagttacacctagaacacggggggatcaaaacatgtggattcccttttctgccacctcatgtgggaatttcaatagctttcactgcctcagagcaatactaaactccctcccaggttgccttgcaatggcccccttattcgtggggatgattaggaatctgcatttttggaccacaagcatctataaagagtggtgttgatcaagaaataaaatttactaggccataggttgctgtgaattgtctagcttctctgccaaaaaataaaggggctattccatgtaaaaaaaatcacaggatccactgaatctgtgcagaaagacatagaaatatactgcaggagcatcttacagacagctgcgcctgaagaccagccaaaacacacaaagcaagagcacctccaatgaccaagtgtggtggctcttcctgtcatcccagcagtgtgggaggccaaggtgggtgaatcacttgaggccaggggtttgagacaagcttgggcaacacaatgagaccttgtccgtacaaaaaaaaatcattttttattattagaatcaagaagagtacctctaacccctttctgttgctttagggcagagagctctggtctagaactcaagttatgaaactgtgagtcccggtgtagctacttaagtttaaacacaagagctgtcagacatttcctctacagcaacgaaatctgtagcatccattttgtactttgaaaacttagtttttggccagcctctaggaagaagaagagggtccagaactgggcatatgggtagggaggggaaaagaaactgactggatgcaacagggaaagacgaagggatggagacctcaggcagagccagtcctcaggcttggggcctgggcctaggaaaggaactaggtgaagaagggaggagccccaggctgtggatgtctctgggggaaccttggttcagcaacggccagagaagctcctgaggccaagcggtatctgtcgcctccctacctttgggcgtcttctggtcgccaatgtgctgcagggctggctttggtgcacatgcgactggtcaccgtggtccccatggggcacctctgctcttctcgaggcagcttgggccttcgcttgcccccacgtctgcagagctgagcaactgccccctatccccaggaaaggcaaccaaatgccaccaacttaaggcacccactgaaggccaccaactgaaggccggttgccctgacaacctgatgtgtcctgcttaggaagaaccaatcaggtcttgagttccttccacacgctgcccttccatttgtgacgtgggagtccaggcactggctcacaaagccacgacccccagcgacactgccccacttttcatttattggtaagtggtagcaactttcaggtttcctcactgtgaattatgaatatgaattatgttgaaattactgtatcctaatgtacctcatgcattgtctgacagccaaagtcccctcttcccccatgacctctgagttttttggaaactagaaagaagatacatttctgcaggtgctttcagaaaaaaacgttgccacgatctaagtttactctgtgatgtcaagtcatatttcatatgtcatacgtattcatatttacattcataattcaaaatgcacatattcaatcaaattaagagaatcgaaaaggaaattttctaaaatttatacactaagtacattatatttttctaatgatcactttgatagagcaaacttagaatctatggtttcaacaaatgaagaggcttatgcaagagaaaaccaccacctaacaaaagattttcaatgtgatcatcattgctacttttcactagcaattatccagtcaatatattgtgaactgctttgttactatggtgatttatttaaacttactgatcctttgattatctcaaaaatatgaataataccaattttataaacttgttctaaaaattaaatgagagaaaaataatcctccttctctatatattgaaaacctacaaaattagtaacattgtgtccagatttttacacacttaccttattgaagcctcatcacatccccgtcttttaaattacaggattattcccagatttttaaacacttaccttatgcaagtctcataacaatcccatcatttgtagatgagcaaactaaggttcagatgagttaaaaacacattcaccatcaaatcataatgagtgaaggaactgggattcaaatccagttctctctaacaccaaaggtggtgcaatgtagtgaagaccaagttatacccagcacatggagggatcaaaacatgtggattccctttctatacccttttacatgtgaatctcaatggctttcactacctcagaacaatcctaaactccctccgaggttgccttgcagaggatcccttctttttggggacgattaggaatctgcatttttggaccacaggcatctataaagagttgtgttgatcaagaaataaaattgtctaggccataagttactgtgaattgtctagctgggctattctctttattttttgttattccactattgacaatagcctagaatcaacctaagtgtccaagaagacttgttttaaccctgaggattactaatgttttcactgtggtcattgtggtagattatattaccattctcccattatctggtcttcctgctgtagtggccctatctcctagaagattatacacttctgtcctattgaaggaaaggtcagatttagacatgtgacctgtttggccagtgaaatgcaggtagaagtggcatgtgcaatttgtaagcagaaaatttcctttttcaaggatctgggagccatctctttcaaacataatcctccagaaagataataccttatttcccagtctccatgagagagtaagagcctaatcttgctccaagttgtaaaaattaccttatatcataaagataaaagaaagtttatttttcctttgagaaaagacagttagcaaagacaggtggcctatgatcgcccccttaccctcactttcaaaaactccacggccctttgtattaggggagctgagttcagactaggtctggactctctccagtattgcaatagctttaataatatcttccttacttatttaactttttccagtgcaattttttctttgactctttcctcctgctctaaaacttacattgaaattttagtaggattcagggcaaccaatctcgaagcttgaatatatgaaagaaccctttaagattaaaaaacccatattatctcccataagttatttcttcggactattgccttattaaaattttctagttcttatttttgcattgaaaaggagaatgatgatttttaaataagttcctactcacttttaatttctactatgacagttttattgcttttcatggcaatagattcctctggttcaacaagaagggcagaacaaggaagtacagaaacatctcaatatatctcaaaaagttatttaacatggacagtgtcatttagaatctttaacatccctatcaaatggatgccattattatcccccttttacaggatattaaaacttacatactgtaaataaccagctgaaagtcatatagcatggaaaatacaataagcatacaaagaagcaatggcatttgaagtggaggagggtgaaggattaaaaggctaaacttagtttggttaagaaaaaagaaaactagaaggtggcaaactcttgttggaaaggggaaggatttggacagagcaaggtagtggagtagatctctccagtaatcatacccctatggacacatctatatgaacaactatccacatatgaaattatctttacaagagctaatgaaccctgaatacatgagtgagtcaatgaagcccctttggactgcaaagaggagtaaaactatgcttggacagtaagggaaacagtactcatgactgtgatactcctcccccaggccataatggtattatatgcagaaagtcctcctgaactcacagttcttacactgaataaagtgagcagaagttgaatattttttccaccatactgagtgccttcacagtagactcactcctgcatcagcccacaagcagcaccatgagtgtcaacagagctgaaccaccagaggcatgctagggacatagagaagggattgggttagcaatacttactatatgaaacttagcagtggctagccattcctaccagaggaaatattatacaagacaggttgtttatgggcaccacgctgtgggaaacatgatacacagactgtccagatttgatggcctgacttgttctccccccacagacagcagcctttctgtggatcacccatgggcccatccagttacattgcatcagtggtgaagccccattgcaagacttgtgtctaacctttgctttgggcacctcctaatttaaaatggaatataatggaaatccagacagaatttctaaacaagcccactgagaaacagtcaaaaacaaacccagactgagaagattgaaacaaatatttaattcatgtatgtgtagacagagatgcacatctaaaaaaataagaatagcctaggaaaaacggcctcaccaaatggagaaacaaggtgtcagcaactgaacctaaagacatgcaaatgaatgatgtggctaacaaaaaaattcaaatagctgttttttaaaaaaaaaaaatctgtgaacttcaacaaagtacagagaaacaatatggaaatttatgagaaattcaacaaagaatttaaaataatgggaaaaaaaatcaaacggaaatcctggaggtagaaagttcagtaaacaaactgaaaaatgcactagagggcatcaagagcagaactgatcaagtagaagaaaaaaaacagtgagctcaaagacatcctctttgaaaacacactgtcagagtagaaaagagaaaaaaatgaaaagaaacaaagaaaacttatgagatccatgggacaccatcaaaaaaacaaatctacagtgttacagtggaactaagaatgaaaaagagttagaagcttattcagagaaacaacagacaactttttaaacttggagaaggattaagatgtttaggatggtcaaagctcactaatctgatttaatctgaataagacaaccacaagacgcattataattaaactttcaaatgtcaaaaagaaagagtaggtcctgaaagcattaagaaaaaggaagcatataacacataagagaattccaatgttcctggcagcagacttctcagcagaaacaatatggaccaggagagagtaggataatagaatcatgtgctgaagaaaaaaactgtcaaccatgaatacagtatccagcacagctccatttagaaatgaaggagcagttaaaacattctaagacaaacaaaagatgaaggaattcattgtaaccatacctgccttaaaagaaatgttaaagaacagtcttcaaactgaaagaaaatgtcactaatatgtaatacaaaaaattggaaggtataaatccacaggtaaaaataaatattcagacaaactcagcatgctctaatatagtaataattgaatgcaatccacttacatgtttttagtaagaaggttaaaatacaaaaaaaaaataacaactacaataagttgttaagggataagtgatataaaagatgtaaattaagacttagaaaatgcaaaatgtggaggagtgattgagttaaagagctgagtgtttgcttttccccatttcttattatcaaaattaagttgttatccattcaaaattacctattgaaactataaaatattcttcaagtgcctcatagcaaccaaaaggcaaacatttttattacatacactaaaaaaaaaagaacaagaaacaaaaacacacagagaaaatcacttaactacaaaggaagacaacaaagggacaaaaaggtacaaaacttctaaaagacaacaagaaaacagtatatggcagtacaagtccttatctatcaataattaccttgaatggaaatagattaaactatccagtaagaagacagaaaatgggtaaatggattaaaaacaagacctaactatattctttctacaagagactcccatcacctgtaaatacacacataaattgaaagtgatcagatgaaaaaatatattttatgataatggaaaccaaagaatgcagaagtagttatatttatatcaaataaaatagacttcaagtaaaaaaactgtaaacacagacaaacaaggccattatgtaataataaagggctcagtacagcaagagaatacaataattgtaaatatataatgcactcaacattggagaacctaaatatataaagcaaacattaatagatctaaaaggagagacaaaaaactgtacattagtaagaaacctcgacatccgattttcagcaatgaacagatcattgagagagaatctcaacaaagaaacatttaaacttcactgtagatcaaaagaattgaacagttatttacataacatttcatccaacaattgcataattcactgtcttttcacctgcacatggaatattgtccatgatagatatgttagaccacaaaacaagtcttagctaatcaaaaaatcaaatcatatcacgtgttttttaaccatatggaataaagctagaaataaacaacaggaggaacttcagaaattgtgcaaatacatacaaattaaacaacatatccttaaacaaccaatgggtcaatgaaaaatatttaatttaaaaaatgtctgaagacaaataaaaatgaaatcagaacatatgaaaacttatgaaatacagtaaaacagtccttagagggaagtttatagcaatacatttctacatcaataaagaagaaagataatgaataaaccatctaacaatgtatttcaaggaactataaaatcaagaacaaactaagacccaaattagcaaaagaatataaagatcagagcacaaatatacgaaatgaagacaaaaaatacaaacgactaattaaatggaggaatcttttttgaaaacgtaaaattgacaaatgttttgtcagactaagaaaaaaagagaaaattcacatataatcagatatgaaaaaggatatactatgatagactctagagaaatataaggaatcatgagtaagtactacaaacaattatacactaataaattgaaaaacttagaagaaatacataagctctggacacatataacctatcaaaattgaagaaagaagaaatagaaaatgtgaacacaccaatgacaaataatgagattgaagaagcaatttagactctcagtcaaggaaaatccaaaagacttcacacagtagctcacacctgtaatctcacagtttaggagcccaaggcaggagaatcactagaggccaggagttcaagattagcctgggcaacacaacgagactccatctctaaaaataaaaataaaaattatccaggtatagtggtgtgtatttgtactcaggaggctgaggcaggaggatcacttaagaccaggagtttgaggctgcagtcagctatgactgcaccactgtatgccagcctcagtgatagagtgagatcctgtctctaataaaatagaggaagaaagaaaagctcacgacttggtgtttttcgctgacaaattctacaaaatatttttaaaaattatacaaattatttacaaactaattcaaaaaaatgaaaaggagggaactcttccaaagtcattctatgaagacagcatttcctgattccaaaatgagacaagaacagcaaataaaagaaaactccaggccaatatcattgataaacatagatgcaaacattcaaaaccagcagttctagcaatgatatttcaaaagcacattaaaaagattatccaccataatcaaatggtatttacccggggaggtaaggatagtctaatacatgtaaatcaataaaatctgatacatcacattaaacaatgaaggataaaatacatatcatcgtttcaatagatgcagaaaaagcatttgacaaaattagacatccttttatgatcaaaccttttaacaaattagttataaaagaacataataaaataaagaccatatgtgataacccacagacaacattttactgaatggtgaaaacttgaaagctttgcctctaggatctggaacaagacaaggatgttcactttaatcacttttttcaacatagtaatggaagtcctagtcagaacaattaggtaagagaaagaaataaaaggcatccatattgtaaaaaaaaaagtcaaattgtccctctttgcagatgacatgatcatatatgtaaaaaaaccctaaatacaccactgagaatcagaaatagtaaatgcatacaataaggtttcaggatacaaaaccaacatagaaaatcagtaacatttctatacaccaatagcagactatctgaaaaaggaatcaagaaagtaatcccatttaaaatagctattaaaaaaaacaaaatacctacaagtaaattaagccatggaaagatgaaaattattaaacatggataaaaacaattaaaaaattaaaataaatagaaagatatcccatgttcatggactaaaagaattgatattgttgaaatgaccatactatgcaaatcaatctataaatccaatataatctctatcaaatttccaatttcattcttcacagatgttaaaaaaatcttaaaattcatgtgaaactacaaaacaccccaaatagccatataaatcttaagcaaaaagagcaatgctagaggtattacactatctaatttcaaaatatattacaaagctatcttaactaaaacagcatggtattggcataaaaacaggcatgtagaccagtggaacaaaaatagagagcccaggcataaaaccacgtatttacatgcaacttatttttgacaaaggtgcaaacattcaattgggaaaagaaagtcttttcaacaaatggtactgggaaagtgcatatccacatacaaaagaatgaaagtagacccctatctctcatcatatacaaaaatcaactcaaaataaattaaatatttaaatgtaagaccccaaactatgaaactattagaagcaaacttaggtgaaatgttatatgtcattggtctgggcaaggactttttagaaaagacatcgaaagacatgcacaacaaaagcaaaaataaacaaatgggattacaccaaataaaaacttctgcactgcataggaaacaatcacaagagtgaagacacaacctacaaaataggagaaaatatctgcaaactattcacttcataaggggttaatatcccaaatttatagaaaactcaaacagctcaatagcaaaaatacaaataattggattagaaaatagtcaagacagctgaatagacatttctccaaacaagacaaaaaaaatcaccaacaggtaaatgaaaaaatgctcatcatcactaatagtcagagaaatggaagtcaaatccacagtgagatatcatctcaccctgcttagaatggtttttatgaaaaagtcaaaaaataacaaatgctggcaaggatgtgaagaaaggggaattttcatacactgttggtggaaatgtaaattagagcaattgttatggaaaacaatataacttccaaaaacattaaaaatagacttatcacaaaatccaacaatcccactactgggtatatattcaaagaatattaaatcagtatgtcaaagagatttctggactctcatgttaattacagcactattcacaatagcctagaatcaacctaagtgtccatcaatgaatgaatggagaaagaaaatgtggcatatatgctgtatttggtcattcttgcattactataaagaaatacctgagattggataatttaaaagaaaagagacataattggctcctggttccatgggctgtacaggaagcataatgccaacatctgtttgactagtcaggaagcttgggaactcgttcactatcatgaggatagcaccaagccatgagggatccacctccatgacccaaacaccccctaccaggcccaatctctaacagtggggattgcaatataacatgagatatgggtcaggacaaatatccaaactatatcatatgcacatttggtcataataaagggtaaaatcgtgtcacttgtgacaacatgaatgagcatagacgacattgtggtaagtgaaataagctaaccacgataagacaaatatcacatgatctcattcatatgtgaaatctaaaaacactgatctaatagagagtagaagagtggttaccagactgggaaagatagggaggagaggttttaacaatgtgtcatgtatcaaaataccacattgtaccccatcaacatgtgaaattatcatgtatccacttaataaaagaaaagaaaaaagaaaatggaagagtcaagatactggggcactggaagaaatagaagagaaggtgagttggcagtaaggaagagagagtctgaaagagcatgtcacagagtggaacattaaagtttataacattagaaatcaatttttaagttattgaaaagttaagtttatagccatgaaagtgagtagctcaattgaagtgaaagtaaaagtcaatgaagattaaattagaaaatatattgcttggcatttagtaattacttcagaaatattaataaatcttaagaaaattaagaacaccaaagcattcatagtgggccattatcataacacgaatttatgtggtaatattttattctttccagtgaagggagtaattcaacagtcttgattgcaggttagaaaatgatttctccaggtgtgacccactgaccacattcattgtatttgaattgcttgagcaatttgtttcaggagaaaatggaaagattttaagatggaccaacgaaattaccactgagtgtctttaatggaaatctcatccttgtctagaataacctgggttatctgtttctatggggtctctgtgtcttttgttttctttgttatttgcaattctgttagttgtagattactgatagtaatgcaaatattcttgtctatagacaggcaaatgattgattttggtggaagtataattaattttcctttttccaccttccatcaagaagtcagttttgaacttatcaagcaaatttatttcagtgttccttagtgcctagatatgtgtggctcttaattttccataaaacttagtataacatcttactggctccctcattaaataaatgagttaaaaatcttagacaagtgttcattttatatttgtaagtcataatttaccctattttaagcaattttccttcatcattcctaaaaatccagattcctatgtcccatgctagacctattgaatcaaaatctcaggcctaaggcacaagaatttacattgttagtaagcttttcaagtgatttttaggcatactaaattgtattaacctttaccattctaattctttaaactagaattattatatttataattccatcttcatcaaattaaacttttggttagcaaaaacggtagaaacccccttattcaatcagattgtgacaagtaataaacagattagtcacgaatttaagttagatggaggaatcataagaagtattagatgtaagtccttaaaactttaatttaaaagacatatgtaaataaatttgccagaattttgatgacaaggtcaaagccttgcacggattcagagtggagtttcttgtggaaactatgccaatgatacgttgtcatggatttcttcttcactttctgtgaagacaactggggtaaaacaatctgaaatcctagattacacaatttttcccatttatttctagttgtcttgccaagagttaagctgacagcaactgtttgagtttctcatttttccaacacatttagtttatttctcaaagaaacaatactacccttgttatactcattttctcagtttacataatatttatttatttatttatgtatttattttcagacagagtctcactctgtcacccaggctggaatgcagtggtgcgatctctgcgcactgcaagctccacctcccaggttcatgccattctcccgcctcagcctccccagtagttgggtgtacaggcacccgccaccatgcacaactaatttttttgtattttcagtggagacggggtttcaccgagttagccaggatggtctcaatctcctgacctagtgatccgcccatctcagcctctcaacataatatttaattaaatcgcatagctacaagaacaagaacaaattgtgtaaacatgtttaggaatcaacacagcttcctcttagaaactatacaatttctgtaatggaaggagaaatgtacaggcattaaaagtagctcaaaggctttcagtttacagtggacatcagtcaataagttgtacaggggtaccagaaagtgctgattgcaaatcagttaagtggaggtcagttgaggcagcatccactgtatcctaatttgtaaagtgaatgttctaaaactgggttcacttttgctataaaggaccagatgataaatattttaggctttgcgaaccatacggtctctatagcaaccattcaactctaccattgtagcaggaaagcaccatagatccatggatgtgctccaataatactttattaaaacaggcagctggtctgagggccatatatatatcttgctgttttcatacaattttctaagttagtagttccctgcctttttaacaatcaaggattacttttaatcctctcctctgattttatgtttcaaaagccttaagaaaaccccacaaaatatatttattttgtaatttttggggggttcttattttactaataagtaatcaatgatatataaaggctacctactaggtcagtatgaaataatcaacattattaactctaatgacttagttctggatagaaataaaaagtattcaactatatatatataacttaaaacctgtatagctttttctggtgtaaatatataacttttcgagatttttccagtattaaatacgacgtttgggaatcctcacacctggctccctatgatgacattcaagaattcttaggattctgggaatcttagaatgaaagtcactgctctgttggaatgaatgaatgaatgaataagaaagggaaggaagaagaaagggcatgtttactaaatgtaaattaatcatcaaggaacgtttattttattaataaatttgtcaactttaggttgccaaatctaacaagataccaacatggcattcatggcgatcacacctctagtcaaattttattttagttcattgactatagtattaatatcctgaaatactcaaaaattctgtcctaattctgtgaataattcacttattaatcaccctatacactacttaatgaatggaatggtgcttggaataaagataattacagggctaaaagggttttctctagaggcaggttataagattttgttgtctgactggaataaaaattaatcaatattttctgcaaccagtggctttcgacttagtcatctattaatatctatcaatcactataacctcagtcctatttcctccattcttctttttgctatcatagaaacttgtccattttattcctgttagatctatatgtttctcctattttcttttcttccaaacaactggacatcaactttgtacagatagtgcagttgatccgaaccctacagaactcactttttccatttacataacttacataactgtcaagctgaaatcactctcaaatttttttaattcaaaattttaatttcatttaatcatagttatttattcattcattaattcattttgaaaataattttaacttgtattttacattcagtggtacatgtgccagtttgttacatgggtatatctcataatgctgagttttggggtatgaatgatcccgtcatccagatgctgatttggtatggtttgactctgtgtccccacccaaatctcatgttgaattataattcccaatgtagggggaatgacattgtgagagatgactagctcatgcaagcagacttcccccttgcagttcttacatggtaagtgagttctcatgagatctgatggtttaaacatatggcacatcccccctggctcacttgctctcctgctgccatggtagaacgtgccttgcttcccccttcaccttctgccatgattataagtttcctgaagcctcccagccatgcttcctgtacagcctgtggaattgtgagtcagttaaacctcttttctttataaattacccagtctcaggtagttctatatagcagtgtgagaacagattaatacatgagcatagtacccaatagttagtttgtcaaaccttgccttcctccttctcccctctagtagtcctggtgtttattctttccatctttatgtccataagtacccagtgtttagctcccacttataagtgagatcatgtggtatttcattttgtattcctgcattaatttacttaggataatggcctcccgctgcatccatgttgtttcaaaggacatgattttttttatttttatggctgcatagtattccatggtgtgtgaaatcgtttggaaggtggcccctataaatctcatggtgaaatgtaatcctcagggttggaggtggggcctggtaggaggtgtttgggtcatgggggtggatctctcatgaactgataccgtacttgtgatagcgaattctttcaagatctggttgtgtaagggtgtgtggtacttactcccactcccattctctcttgttcctgctctggccatgtgatgagcctactccttcttcatcttgtatcatgagtaaaagctccctggagactccacaggtgccatcagatgccgtcaccatgcttcctgtacagcctgcagggctatgagccaattaaatctcttttccttataagttacccagtctcaggtatttcttcatagcaatgcaagaatggcctaataatactgtgtggatgtaccacattttattgatccaatccactgttgatgggcacctaggctgactccatgtctttgctattgtgaatagtgctgtgatgaacatgcaagtgtgtatgtctttttggtagaataactgactttctttgggtcatataccagtaatggaattgttggcttgaaaggtaattctattttcaattctttgagaaatttccaaactgctttaaacagtggctgaactaatttacattcacaacaataatgtgtaaatgttcccttttctccacagcctcccaagatctgttgtttttcgattttttaatagtagctattctgactggtataggatagtatctcattttggttttgatttgcatttctctcatgattagtgatgttaagcctaatctctgccacctgaaaactgggaaaatactgtgtcgcttgtcaaaataaattgttttactttgctttaaaaataatcaatttagtatatttcttccagcaaaattaagaagtaaacatttagaaatgtagagtaccttgctgttaagtcttcgcacaagtataccaatacaacataaaggccatattaaactttcatttgaaatgaaagacaatttttaagaggttaagggctagtaatttgttaaagtcctgaagttaaattagctcaagtaaatacaaagactttcctttaattaaagccttttaaatgaatactttaaagcatagttggtttctccttcaaatcttgtccaaagccactgtttacaactcagtatatcaaagaaggtttcagacatgattgtgaagctccctcaacttacaatgtgctatttgcaaccttagatggctatcattctggcttttctaccttttagcaacaatatgcacaccattcccatttctcccccaccctgacttacccctctttgcatttaatatataatttttctcagagtgttcttacacatctttaactgtaaatatgacaaaagcacacagtatagtgcatgtgccacatgtataaatgttgtatctagtcatacaattttccttttaaaaaagaaatatttcattttcaaaaagcaaagactctaggaatcttttctagctgccagtcataaaaacataaattcctggttacattcccaaatttgcctgaccataagaaccacttgtggtacttctcaaacacatgtattctgagtcccatccgtgatctcctgaatcagaatcagcaggtgagaggcctgggaatacacattttaaacaaacgtccacagtgattacgattaggcaagcttgaaaaaaatttcactaggatctttatgactgaatatcctcacaaacataggaaagttactggggaaaaatatgagcagaatttcagaattctccctttgctgaaagtgtttgttccctccgcctctactcatcaagacttgactgcttatgtaactcccccaaaccaccaacacctggaaggagttgaaaatgattttaatgaagaagaaaagctgatgtttaatttcaaaattgatggtgacaatagaaggaagaggcattaatttatcttgattctaacacaaagcattgtatttgagtctacaaactaaattggtttcatttttattttttgtaagttttcaccaaactctaggcatatatagaggctgggcaagaaagaaagaaacccagaaatatggcatatgtgatcccttatttatttccccatgagaccagccaacagcttcttcacctagtccctgcttcaagctgactttctgtctacttctctatcggaaatggagcttccctaaagactacctcaatgtcggttacccacaggccatttttccatcttgtgctcctaaacttctatgatattaaatgatattaccctttctggaaattgtccttaactttgattttataattttactctaactttgtttcattccttcttttatagcctttcttttctctatccctttactgcagacatgttgtatggctttgttcttgaccttctgatctctctacgttcattcccaacaggatgtatccattttcttcgcgtcgcgcttcctaactatctgattattaccaccatataacgatgttggtgatgagcatagctaacatatcctaggcattttccatgtaggttataataagcaccctatataattcgtaccatttaattcttcaaccctaaatgatactattactaaccacattgtatgagatgaggaaactgagattttcatcaaaaccatggaaagccaacgtgaggagcccctgtgtgtctcctttgttaatgcctctgagcatcatggcatgtggattgcggtggaatggggattaggaagcgcagcactgtgaaaacaccagaaaatatgatagcaggtaaggacgctcatctctgcacattgagatggttttgtttctgagtcaggtttgagatgagtcaatcctgactccatggtgccatcagggatcaggaatttagtaagatcttcatggatgcttggaacccaactggtttctgttttctactttagggaaagagccacaacttgagtggggtggttttggtgtcacatacgctatcaataatacccaccgttttggtgtcacatacgcgattattaatacccaccgctgcggaggaatcaccgtggactactcctcgtttcatcccatgctcttgcgatggatccctgtcacctgtttactgatttcattcaaattattcagcgaccacaggaccccgatttgccttctctatcttggttcccatcactctgctttacaggcctggcctgctcgtggctcctcacaccagcgctgcacgtctcccttcttgcctctgccctgtttcctccagcagacaggactagcttcctccatctctatggggcaaaagcctgcccagcgttcaagaccctcctcagatgccgcctccacgattaggcttcttcctgacccctgagcctgtaacacgcgccaccataactctccaccttagcccacattcccacagcactcgcgacatccgcggccctaaacatggagcttcattctattttagggtatttcctgcttgtttcctgcacacacagtcgcgtgaggcacagccccgagtgacccgcgcttccagactcgccgccacaggccggcgagggcaacctgagccgcttcccgcctccgcggggaccgtcgccagcccgcagctctagcgggaggcggttccacagcgagcccagcagtcccgccaccgtcagcaccagtgcctcaggcgggctttccccacctctgggatgcacaaatcctcaggggctccttgagagggagccagggagcagatgcgtgcggacacctttcggccctctgcggccgctgtagctccttggcagaaacccggaagtggaaatctcagccactcagcgtttgggtgaagacgaaggcgggttttggatagacggacgctgtcagggagtgtttacttcgcctccacttcttttcctccccgccctggtgccgctccaggtcacatactcgtcctgagctggcttcagcctctccacgtagaagtctcccggagccatggccgagtactcttttgtgaagtctaccaagcttgtgctcaagggaaccaaggcgaagagctgggtcctgcagctccagcgggagcctcctcagttcttttcggattcactccacgcccgcgaatccggtggaagccgtggtgcggagagccggcttcgtggcctcccaggtttcgccctgaccctgtctgggctggacagaggccgggccgcggttcgtggcgcctgtgcagagaggggcagcctcccgcgtggacgacactggaaacaggatagatgggcgggtgacccgtagccccgtacccatgagtttgggtccgctgaggcatctctcccggcctctgcctggtgggtctgcgtttgtctgatcttgtagttcatgataataacttcctttactagggattattcttttctccattgtctcttcctggaaaaattattgattatttttttctaagctagtatgtagagtgaaaccaggatgaatcacacagtggttgaggtgtatataggctttgatagggatatgggctggaacctgcactccgtcatttactaattttgtaatttgtggcaaattggttaatatgtctgaacttccatttactcattaagagatcaagtatctttaaacctccgtttacacatttatactttcagaccattttttatacctttagaagactgtgaggattaaattagagaacgtatatgcagtaaataaattgagccaaatgtgaggaggaggtcgtagtggtaatttattagctctttaggagaaaaatacctgtgcattcatatccccgcttcttttttaactggcagatttgcctgaggttgactgtacatacaaatattgagcatttccttctggtctccgtgataaacagaggttttgatattgttaggcgagatggaaagaaagtgtcaaggagtgagctgaagccactgcccttgagaaccctctcgaggagtctggcctcatgaagatgccagaataaatggcaggtatatcctgaatgaatgtgagatttttactctgtgaatttcctgtgaggagtggtgagttatcttctgaaaactttatgatgaaaatggagacaagagtgtcttaagattatcgtaataatcataattaatgcttatatagcactttcaatgcgccaggaaattgttgtaggcactttgcacattaacttttttcaaatcgctcttgggtttttatttttttatagcgatgtaattcataattataaaattcacccttttgtacagtcagtggtttttagtacatattcaagaggttcaccactgtctagttgctcagcattttcatcatctcagaaggaaatctcttcctacccattaaagcaatcacaacccatcctccttctctcctagtccttggcaaccactagtctcctatctatgtgaaattgcctattctgaatatttcctaagaaatcatgcaacatgtgaccttttgtatctggcttctttcacttataacattcttgaggtccatcattgttgtagcgcttgttcctttttatggctgtgtagtattccattgtatggatgtaacattttgttcatccattcatcagttgatgaacatttaggttgtttcccctttttgactattgtgactaatgctagtgtgaatattcttatgtaagtatttttgtgggtgtatgttttcatttcccttgggtatacatacttaggagtaaaattgctgggtcatatggtaactctttaactttttgaggaaccccaaactgtttcctgtagatgctgcaccactttacatttccaccagcaatgcgtgaagatacatattacctcttaatcctcacaatagccttaagagttaagttattatcctaatttattaagtggggaaactgactcccagagagattcagtactttttacaaaaatcacagagctaagaagtgacagaatcaggatttaaaatctggcagtgcggctctacaatctgctttgaactttagcataatatgtacaaagcctgaagcaacttctcagtactgtatttaagagggcatagcaatgtaagtcttcctaaatcaataatttataagtgaaacagcttaaaagacttccaagtttcaatcttacgatatttatttatcacacaaatcaatatacctaaactcatctgtataaataatgtcctgtagtaagaagaaaaagaggaaagataagaagagaagaagatgaagaaacccagtgtgatatgttggtgagtcagttttcagtgctttattctgaaaaaagttaacatttcttgagatctcattgaaaatattttcctagttagaaatttatgatgtattcatatttgtcttaaagtgcttaaatattacctacagttgtaaattccatttattctttagcacagtagatgctactgatccctttacttcattatcagaacagagcacaggagagaagaattacaactctctgacttagtaggcaccattagactgcttaatagccagagattctgatacataattttaaaggcttaatgtaaatgttattcaaccaaatatattttacaagttattttctttgaacatgtatacattttagttgtagaagtcagttgtctcttaaacgaagtatcttcacaggaaaaatcatcattttgtgaactctgaaatgaatgaaaattttaaatacaatatcagggtagcctgtaaatgatactagaaataaactgacccaaacacacttaaccagcctgttttccacttagttgtttccgtacttgtttttctcttttaaaacttggcaaattgcattttgaatcttcataatttatggtagcttaaaaaatatataaaatatggaatggtataaagctaatattctggaagaatcattacttttgaaatggcaaatcaataattctaaaattagcgtaaatatctagggtagatatgtagatgtggaattgctgtgtcaaaggataggtgaatgtttaactatataagaaactgccaaaagttttgtaaaggggttgtgccattttaccctcccaccaacaatgaattagttctccagttacatcgttgccaagagtcgatggagttatcagtcttttctcccagtctgagttttaccttttcagtttcttaatggtggtttttggatggacagcttttttttttttttttttttttttttcctgagatggagtctctctctgtcatctctctctgtcgcccaggctggagagtagtggcacgatctcggttcattgcaagctccacctcccaggttcatgccattctcctgcctcagcctcccaagtaactgggactacaggcacccgccaccatgcccagctaattttttgtgtttttagtagtgtcagggtttcaccatgttagccaggatggtcagaagcttttgatttttataaagcttagtttatttttttattttatggttactgccttatctctttgatctaagagatctttgcttaccccaaagtcaggaaaatattctacattgtcttttagaggtctcatagttttagtttttacattaaatctgtcattaatctcaaattaatttttcgcatggtgtgagtttggtttcaagatttacttttttttttttttaacatcttgatagccatttgtgccagcaccactggtgtttcctttttgcattaatccattttcgtatcttcataaaaaatcaattaaatttctatgtattggtctatttctggactctgttctatcgattgtctttttttctattggtatatttatcttgattgctataatttcatgaagtgttgagatcagatagtgtgtgtcctccaactttgtacttactaactattagtttattaatttctacagtgaagcctgttggattttctcggagaattatattgagtccagattatttgggggagaatcaacatcttaatatttggcctcaatatttcataattttcaatgtagcagtcttgcatgcctgtttaaaaatttattcttaagtattttataattttacactactgtcagtagaacttttgaatttgattttccagttgtttgctgtcagtatgtagatatacaattgatttttgtatagtgactttgtagtctgataagtctgtttcacttattacttctagtggtttgtttatatagaaaactaagaaatttgcaattatgtttcctgtgactatccttttacttcttactttctaatccttaagtcttgtcttgctttttattggtttattatactgtccaggacttccatagtgttgaacagaagtcacgagaatgggcataattgcattgttcccaagcttaggcagaaagctttcagtagtccaccgtatggtatgatatctgtaggatctgcagagaaaacctttatcaaaatgaggacattccttttaaactttgcttcttgggagtttttatcataacgatgtttaatgctgtcaaatgcctctttctgtatctgttgagatgattatacaactttcttcattctaccaatgaattacattggtttcattttcaacttttaaactaattttacatccctcagataaaccccacttggttgtggtgcgttgtccttagggatattgcttgagttgatttctaggtgtttgtttgtttgtttttaagatttctgtattggtgttgatgggagatattggacttttgtatccttttcttgtaatgtttttatttgattttggtgtcaaggtgatatttggtgtcataaaattagatgggaagtactgtctgcttccctgtttttggaaatagctgtgtaagattggtatgatttcttctttacatgtttgacaggatttaccagcgaagtcatctgaacctagagggttttatttggtttggttttagttttttgtgggagaattaagattttttaagagatattttcagatttttctgttgtcagttttggtaatttgtgtcttttaggaaaatttcatttcatccaagttgttggatttattggcataaaatttttcagaatattcctttaatatccttttaatgtcttagaatctaatctgtattgcagtctcttcatattggtaatttgtgttttttctattttttcctggatcagtcagtctagctggaggtttatcaattctttataagatcacttattttagatcattaatgatcttttaatacaggggtattcaatcttttagcttccctgggccacaatggaaggagaggaattgtcttgggccacacatagaatacactaatgataagctgatgagccaaaaaaaaaggaaaaaaaaatctcataatgtttcaagaaagtttatgaattagtgttgggctgcattcaaagctggcctgggccacatgtagccctcaggttggacaagcctgtttcagtattacttattttgtctttttttcattttttatttcatttattttcagtctttttttccctccctttaacttattttcagtttactttgctcttgttttattgcttcttaagaaagcagttagatatcttcattccacgtcagttttagttatagtcaacacattttgctttcattttcattccattcaaaatatcatctagttttccttgtgatttttctttccatggacatttgagttatttaaaagtgtattgtttttcatttctactacatagagatattataggtatgttattgttgctgatttctaattcatttatagtatagttggagaacatactttcttagtgaatttccatgtacacttcaaaagagtgtgtattctgcagatgttggttcagggcttcttgttttggttttttttttttttttttttttggagatgaagtcacgctctgttgcccagcaggctggagagcagtggcacgatcttcgactcagtgcagcttccgcctcccaggttcaagtgattctcctgcctcagcctccagaggagctggaaatacaggcacctgccaccacgcctggctaatttttttaatatttttaatagaggttgggtttcaccatgttggccaagctggtctcaaactcctgacctcaggcaatgcgcctgcctcggcctcccaaagggctgggattatgggcgtgagccgtggcgcccggtggttcagtgttcttcagaggtcagttagataaactggtggagcttgtgactatgcacatcttctgtgtccttactgattttttactcatcctacaatgtattgagagttatgttaaaatctccagctgtaattctagatctgtctacttgagcagtatttgcttaaagtattttgaagctgtcatgtgtacacatttaggattgttaagtcttccttataaattcagtctttcattttcataacattttaacttttatttctgttaaatgtcttgatgcctagttaaattatttgaccacccttttgctcctgacaagcctgggcctttgttagtttgtgcttatttattaggtttttgcctgcagacttagacagtgacacttactctaggaaagattcatcctcatgggtctcagccacatgttctaggtatactttgtgagttctctccactctgctatgtcccaaatttgtgtgatctctggcatctccaatcagccctcagaagtgccagccactctgccgaggccttgtggagcctgcctgctctatgcattcccccccagcccttggccccagacctgccgagaacttttgcatactcttttgagacctcacctgtatgtagttccctcttctccagtaccttattctataaactccaaacatgttagcactgcaagactctcagcttagtgacagtgacattacctcatttctggaggtctctacctctctgcatggtcaagaaactgccattgggcagaaaacagaattgtgtgtgagatttgcctcctgtgttttcttgttctcaaatattacagtcctgttctgcctgtgttccaatccccgaaaagagttttctcaaatattctatctagtttcagttttctcgttggtcatcgtgggagggcaagtccatcttggctggaagagtaagtccttctgcgtctttttctctttgtccttccaccttcttttgcattgtggattttctcaacttgccgtataagtaagcatgtgcctatttgtgaagggaaagaaaaaaaccttttaattttttaaagctgttctgttggttcctcacaaggatctgaagggattggtaaataggatgaaagaaattctgactttcacatggagagtaccatgtgtgacattaataaaaatgagcatgtctgtaagcaaggattttcactgagctctgctagattcagaagcaattgaacttacaacatcgtagtttgcaaaacacagatttgatttacccaggaactaaagctaagtcagctatgggttaatagaagttctgtgaaaggtacttagactacagtaagattgggaaagaaaattccatttccaaatctaagatatatcattcctttgtgccaagcacataatgaaggcagagatttaagggggtccttagcacagaagaactgggttagtcagaatgtgaggtgagctgtcacacaggcttgatgctagaatgagggtgccctgatagtaccttatcagccatgacactggtgcatcgggccagttttttttttttttttttttttttgagacaggctgttgctttgttgctcaggctggagtgcagtgacatgatcatggctcagtgcaccctcgacctcgtaggctcaagcagtcctctcaccttggactcccaagtagctgggaccacagccttgtaccaccatacccagctaatttcttaatttttttgtagagatgggggtctccttttgttgcctaggctgattttgaattcctgggcttaagtgattctcctgcttccacctctcaaagtgctggattacaagcatgccagacatatggaaacattctcatctatgtgaaaatatgtgaaaagctttgttatgcattgtgagacaacccagcaggaacatttcaccatctgcctaaggtttaaaaggaaataactttaagcatatgtctaaatagcaagtaatgttttagagtggattctcttaaattcagcttgtgtgtctgcagcatatacacagctggagctgtcacctgacatagagacaggcaacttcagtgcccactgttcttaggatccactgctttttcacagctaaaaccccctagtggcatcgttaagtatcatgttatgttactttagtcattaaacatataagcatacctccaaaggttgaatgtaggccacttgcagaaagtaggcagaatgctcacatttaattctcgatgatactgtgtttagctttcttattctttgaaatcccattgagaaaaaatactggcatctgctcaaattaatttctttttcagttgacaatattataagtaatgttgtagtatcatttccctacttggacagagggtgaaaattttgaggaacttgtctgccagaaatttcttcttcatttgcaaaacattaatgagatattatatttaaatgattttatttaatattaagtgtacttggtgaacgtggcatagaacatacaaaataaaactaatttaaaattattaacttacatttataggaaagacttgctaatcataacactgttcataatgattctgaataaagcattatttcttttactgaaaacaattgcagctataactcagtcatctaaattgtcattagttttatttctttctaatcgtctttagctgaaattttaattttgattaattttctttttctccattggttttgtgtgtgtgtggaggtaaaatatacagaatattgaatttgccagtttttctatttttacgtatacacttcagtggcatttgaatacatgcatcattttaccttccaaccagcattgcacagggtttcaatttcccacatcctgcccaacatttgtttttctggttttcttggtttctgttttttgtttgttttgataatagcattctaatgggtgtgaagtggtattgcattatgtttttgatttatatttccctagtgactagtgatgttgagcgtcttttcaagtgcttattggccatttgtatatcatctttggagcaatgtccgtatatatcctttgcccagttttgaattgtggtatttgtctttctggagttctctatatagtctagatattaattccttataatgtatgtagtttacaaatattttctccattctccgggttgccttttactctgttgacagtggttcttgatgcacaaaagtttttaattctgatgaagtccagtttgtctacgttttcttttgttgcctgtgcctttgatgttctatataaggaatcattgccaaattcattgtcgtgaagcttttcccattttcttctaaaagttttctaactttagctcttacatttaggtcttttgtctattttaagttactttttgtatttggtgttagacaaggatccaacttcattttagctaaaattttatgtattttaaaattgattatgaaaagcatgaaatgtttagttgaatagaaaattttgtgcagtggaattaattgaatctttaaaacctttttattatggaaatatccaaactaatccatacatagaagaatataatgagtcccccatgtgcccaggccccaccattaaatatcaatattttgccaatctcgtttcgtttacatacatacccccacacacgtttttcctagaaaattttaagtaaaatcacagatattacatcattttacccataagttcataaatgtacatttcttaatgtggtatgtctttctctcatcacctgttttgttctttacttttatacattatactatgtcattatcagaccttgtaaaattaacaagaattccttaatatgtcatatccagttaatgattgactcatttctactctagttaaagtacaatttaggaggagttttgaggatattttttaacattaagatataaacttttataacaactgctaaaataatggttgctagactctaacatttctattggcaaattggacattagtatacatagacatagattctgctcattttgctttcaatctaaaatcataattaagattactggctgggtgtggtggctcacacctctaatcccagcactttgggaggcagaggcaggtggaacacgaggtcaggagttcaagaccagcctggccaatgtggtgaaaccccgtctctactaaaaatacaaaaaaaattattcgggcatggtggcaggctcttgtaaccccagctacttgggaagctaggcagagaattgtttgaacccaggaggtggaggttgcagtgagccaagattgcgtcactgcattccactctgggcgacagagcgagactccatctcaaaaaaaaaaaaaaaaaaaaatactatgctagaaagtcttcctgtagaggcatttttaagaagcattatgataggcattgcctctggaaagcaggcatgaatagatggctggggtctatcatgagagagaccgttctccatatatcactttgtaccttcacatgttgccttttgttttgttttggtctttttttgagataggaccttgctctgtcactcaggctagagtgcagtggtgtgatcatagctcactataaccttgaactcctgggctcaagtgatcctctttcacacctccccgagtagctgggattacaggcatgcacccccatacctgactgtatgttgctattgtgtattttaaaaacctaatcctgactgtgctggtagtcgcaggaatctgtgcacatacatgcaaacaagtacatgtaaaactggtgaaatctgaataagcttcatgtattatatcaatgtcagtttcctgattctaacaatgtatgatacttatgcaatatgttatcattgagacaaagcgagtaaaggatatgtgagatcttcatagtatttcttatgactgcaaaataaaaggtttttaaaactaagttataataacaaagaactctgtcaaaactaaaataaaaaattgaaatatcatttttattttttaggaatctggtgaacagtaacaaactttggtgaaatttcaggaaccatagccattgaaatggatgagggaacctatatacatgtactcgacaatggtatttttaccctgggagctccacacaaagaaggtttgtgtctggaagggaagatcctgccacaagtgtagattttaggacattcattcacttaggccaaactctaactagtctcaaacattttccaaaggaatggaaccattgcatttgactcttccattttttttaattccttaatatttaccagccattggcaagtccctctttctaatataagcatttgaaaacattccgtatggttccagaagagtatctttggaaatcaaaacaatatgaataattaaaatagtaagtggaaagaaaaaagaaaacctatttgggtcaaacatatttgaatttcttttttattcagacctattaccaaaactaacctgggtgcatttaacaatttgaagtttcttcattttctttagcccattagagaaagcactaataagatacgaagtaattagaagataaaaagcagtatcatttcatcagcaaggccatccattgaataaatgaaagcatttagcttttttaaataagtgcttatttatgactgtattttaaaacataaagagaagctatctcaaaagttattaaataagcattatatcaccctgtcttactcagtgtataaaattaacactgtagttacaagaaggtaaaatagatcttgattccaaagatacagtattacagtgacatcagtatatctgaatattcttacatttaattgcagaagaaaatagccacattttttaaagcaaaataatatctttatatttatagcaaatgtcaaatttattttcaaatgttttttctccaatagttgatgagggccctagtcctccagagcagtttatggctgtcaaattatctgattccagttgaacttatattgtaatataattagtaaccagttattttaaaaatttaattgtattcattaaaaattttagtatgtatcttaagtccatggtaattttgatatataaaacaaaatagcttttttgaaaagtagattttgtgatctactttcagtggatttcttatcaatatataatgctaggctggaaaaaagatatgtaagttaaaaaatgaagattaataatttcacacaccaaataagataaattaaaaaataaataaatttgtacaaaacctggttcactgttgctatgatatttaaactcactgtttggaagtctaaagacaaacaggaagactaaaaaaaaggaatattgttaaaaccagcagagaatgttacagcatcataacgaccaaaagaatatttttcctcactatttttacagtcattttataaagtaaccttttttattctcaccttgtgcagaagtatagaatgattctttgggtaaaagatactgaaagtgaatttacatattttagtaattggttacatcaacatgataatgatttctgttatataatcattaatgtataaaggagtaaaagtcaattctggcatccgaggagattcttggtaaggtaaaagaaatcataattttaaaacatcacattaagatgattatttctatactttctttgaaagtctgataagtagggtgaaagaataaaagcagaggaagaaagattcaatagttttaaactgctttacagttataaacaaaaaaggattataaagaaaattaactgacaaatgagaaaatatttgcaacaatcttaataggcagtgagttcttactcttcatacatatcttgtatagaattcatagcactgaagaccccagtagaaaaattgcgaacaatcaaatctgaatagaaaaatggacaagggacattatcagataatctaaaaactaaaaaggaaaggaaaagagaaacaattgttattctagttaactactaaaatgcaaattagtaggatactgtttttttccatattaggttttcaagtatttttttagagtcataatgtttaaaaaaaatccatgatacaaaccatactctgctaatttgaggtaagaatgtaaatggaagcagcattttctggaaaacagtttgatgacataaagttttagtaatttattattgaagtttataactaaagaggtataattgaagaatgatgaattttgaaaatatttgttatgtaatatacaaggtataatgtttttattaaaaaagcaaaatataaaactaaatgtaaaactgtaccatccaatatggcaacaactagtcacatgtagcttttttttttttttttgaagacacagagtctcaatctgtcacccaggctggagggcagtggtgtgatcatagctcaatataacctcaaatttctgggctcaagcactcctcctgcatcagcctcctaagtagccagtattacatgtgcacaccaccatgcccagctaactttttaaattttttgtaaagatggggtctcactatgttgtccaggctgatcttgaacttcttgcctcaagcaattctcccattgcctttccaaagcacagagattacaggagtgagtcaccactcagccacatgcatcttttgaactcttggaatatgtccagtctgaaactttagatatgtacacacccacacacatacacatgtcctgttttgatgttctataattaattttctctcagtttttaacttttatctatcttattaatgtacagaatcaccctgaaatctggctatggaaaatatcttggtataaattcagatgaacttgttgttgggcgttcagttgcaattggaccaagagaacaatgggaaccagtctttcaaaatgtaagtgctgtttttgtttataaaaacttcctgtcagtttaacacaaagtctgtaacagtaaatcataatatatttaaaaacaaaaagtaggatgcagtagtataatacattaaattggaataaaccactaagaacatacagccttaaagagatttcaaaatgtagtgcaacaaaaatagcattagtacttttgcccacaattatttctctatacccttagtgcctaggtatggatctcatttccactgaagaaccagtcaattttaggtcacagagtaggaaaacagaatagttcctaagtatcttctttgtagcagaaaacatggatgatttcagaaacattacagactgcaagtaaacagtggagctagctaagaccaagttgtgacaatttgcgtataaaatataaataataatagttcattgaagtaaattatctctaaaagactttcagttcataagcttaaaatagtgtatgaaaagatagttttaatataagaagaaaaaagataatatactaattcttaattttagtaagtaaacaattgtagtatatggatgttttgttaaatctttgttgatacagaatacataatttcctttttctgtttgtgtgagaagaaaagattgaacaaaaatatatgagtgctaaactgtctttaaaaagtagataactatatcaaaaacagtaaggaccagtgggcaccacgcagaacaagcaaatagaagataatctcagctttgagtagcagctttggtagtatacattaatgaactgaaaataggtactcagcagtgttttctaagatgacagattaaacaaacatcccaccagaaagtggtaatcacttagactaatttcctcatcccctaggataaaatcttaagtcggtgacttgaaaactattttgacccaatccattgacaaatgcatttttacattgcagcccagcacacacatatgtataactgaagcaagagttgtacttaacaatacatacttatccatgtgttatgaaccttgatatttcttattctcttttaccccttcctctgtgtgtctgtgtgtattccttttcgcccccacccacccaataccgttcaggaaacactacattgatttcattacctgctaatgtgttgcaacccctttgagatgattctacttattatgatgagatgcttctaataaaagttacaccagtagaaaatgccaatatttcataaggccaggatgatgacttagatagtactaataatacaacactttaggaaagttcatttcattttatttttaggaaggacactaagtttcaaaaatttaaatttaaatgaaagagggtcttaaaactctattgcaaaaaggactcagctgaataatctgtggcacaggtttaaatcgccttggaccacaccgccatgttccagagctcaccagtagccatccagatgagagaccacccagcccttgtgacttgactaagaaattaaatccatgttatcagcacgtttttaactggatgtgttataaggttaacatattttgtaatcattgtatttataaatattttgtctaaatgttatggtattccaagttttccaaaagaatcaaccaaatacaagttataaataaacgttatatttgttacgggagttaagctaaccaaatttataacccagatttagctacacaagaaaatcagtttttaaagttttgtttaatagaaaccagtgtaatacatcaaatattaaacaattaaaaatgtatatgaatatttattttcacacacaaaagtccctcagacattgattcttaaattccaaacaccgaaggcattgtatatacattttcatgttttctaattgtgaagaaaataaattttacttaaaatgttaatatttgaataaagtatgcattcataattatgttcttgtctttaaagttaattttccaaacagaactaaatcagttttatcttcagtagatcttttagaaaggaagcaatcctacctcatctaattagaatttagtcctactaggaagatacattataaatgtttattgtggtaatctttgaatagtaaaatgaaagttgattttggttcccttttctatatgttcttgtattatatttttcaggtttttctctaagttcttttctgtgatttttaaatcagggaggaaaaattaattcagtctaaacacttaatgtttcttctacaagaagtatcctcatggctatattgttattttgtttcacttagggtaaaatggctttgttggcctcaaatagctgctttattagatgtaatgaaacaggggacatagaagcaaaaggtaaaacagcaggagaagaagaaatgatcaagataacgatgacattttatacagatgactgcattcacacatgcaatgtgactatctctttaaaatgttaagtcatcatttactgtcactttaaagatttagttaatagcttttataatgtgatgtttcaaatagactcatttttaattataaatcccatagttgatggcttgtttatacaatgtggtagagaaatcagtgcatctaggagctaccttgccattatctccatggattagtatcttttttctggtagttccacatgctctttttaagctttcattttcttgttttcttgtttgtattttaaaatctgattttttaaatagataacatgtacatgtggtccaacatttttaaataaaagcatataaagatgaagatatatgcctgccatgcatcttactcacctgtgtcccagctcctgttcctctttctctttgttttgtttttttatagcctcctaaagtttctttataaacatatgaatatatttataattttcaactgttttacactaaaggcaacctcctctatagtcttctcgactttgattttttttttccttaaaattgtatcttggagagttttctactattagtttgaatgtagaaaggtttctctttgtcttgcttttcctctctttctctctctctctttattaacagccacgtaatattccattttagggatgtaccttaatttatttagtcttttgtagatggaaatttaggcttttttcagtcttttgctcttataaacagtgctgcagtacataacattgaatatgcatcaatttgtagatgtgcgggtggacctgaagataaatttccaggaacagaattaccaggtcagggcatacgtgtttgtatttacataatgcttgagcttctgtgatgataatcactctatgaaacataaaaaatcatagcagaacttctggggccttagcccttacattttaaaaatatttttattaatagtacctgtcttctttgcattaggagaaacatgaatcacgtaaaacatgatttttattttatttttaaaatttgtgtgcatcactaacctggaaataaaagttccttattccaggctaaattccctcatccatagtcagatgcgttatccattgcaccagtggcctgtgctctccctaatcctactctttgttttacatcattgtaaaagttacacagacatcttcatatcaaggtgaaattccaaataatactgttaatataacctagaaaattaaggtagttaactggaacttgatgaaaacatttaaggattaattttttagactcacaaaagccactgatctttaatgatatacatataccaggatgtgtctaaagaataactccccccttcttgacacatggtttttctgtgtcttggcattccatcgcagtactgagcaaaggcactgatctttaatgatgaacatataccaggatgtgtctaaagaataattccccccttcttgacacatggtttttctgtgtcttggcattccatcgcagtactgagcaaaggcactgatctttaatgataagcatataccaggttgtgtctaaagaataactccccccttcttgacacatggtttttctgtgtcttggcattccatcgcagtactgagcaaaggcactgatctttaatgataaacatatactaggatgtgtctaaagaataactcccctcttcttgacacatggcttttctgtgtcttggcattccatcccagtactgagcatccagaaccttactttgtttgtctctgttgggaatcccaggttgcatccagtctgacccagatttgctctgtaaggcgttgtgggggccagagtggaaggctctaagagagggggcaaatgccttttctaaaatgcccttcgttcttataattagagcataaaaatttatgttacatttttatctactaccagtgtaatttaaaagcatctatcaattctctgtacatgattcatgttagatttccggtcatatgtttgattttctctttagaatagtcttgatttcagataatttcaaatctaaagctcagacaatttcaatctaacatgtaggtattttcttacagttagagaagtgaaatgttatatttttttgttgcatgcatccggcacatgagttgtagtcttgaatttccataatgctcctgtgaggtggatgtgagctcagccttacagacaggaagacagcctctgaccctccttacatcctcgtggtttttgtcagtcagttcatggaaatcacagtgatttcaaggtgtggtaagacaggatgtgtacccaggcccagctgactccagaggccactctcagtatttcatagcacattgcttctcaggaaacaggtcattgaggaaatgcagatgggtttgtgacttacatttaattttacttatttatattttattgtatcatgtttaaattatttttcatctggatatcatcacaaaagtgttactgaaggcaacaattgcaaatatatgtgcggtgctttgcacttatacaaagatacaaagatacttacacaaacattgcatttttcactatttaaagcaattttcagatgaaatacaaagttttctgtgtctctttggttagtcaagtacttggaagctctgaacagtgattatttaggactctttttgtaccatttaattgcaggctctcctaatctctgtcagcccttcacctttatgaccttgccttgtctaccagaacacagacccctcttactaaaggtagcattgtgctacaggccctagcagggaatgttttcaggtctgggacccctctaatcaaaactgtcacaaagatgtcattggcacaaacacgttatttgtcatcactgtctaagcagccctggaactggactctggccacagagatcccttaggagacatgattccttaccattgccaattgcctgttctgtgggcaatcctaatttttgaatgcagattaattaactgatgacatgtgatagtaaacatctatccaaacttaggaggatataagaagctagtaaaagaggtgagttccaattaattaaaatcaagttgtgtaatgttaaaagttttaatactttggtaatagtctgtgcaatataaaatagctattaagctttcaatctgatcaaatgaacacttgtctactagggataatttgatcctagtgtattcacttggaggataaaattaaattaatgatttctttattgcctaacaggatctgatgtgtaaaatgtttctgaaataattttgtctgtagtgtttctgacacaagggctgtggagaaagcatgtgatagcacttactcatatagattatatatatgaagtaaaaacacatagccagaacctgtctttttctgaacatagttgctcagttaattttttcttctgcataagaaatcatctcgaatattcttaggtgatgtgtaaagtggggaagatggaagataaatatataacccattggattctcttttccaatatctagattagatcctgtgctgaaagagaaaccaagaaaaaagatgacattccagaagaagacaaaggaaatgtaaaacaatgtgaaatcaattatgtgtatgtatgcttttccttttagacctacagatttgacagtgaagtgcttctcaaagtgctttcaaaataaattacctaattagctggggatggtggtgcatgcccgtaggccccactacatgaaaggctgagacaggaggattgttttagcccaggagttcaaggctgcagtgagctctgatcaccactgcattccagcctgggtgacagagcaagaccctgtctgaaaaaatgaaaactgatggacaagaagaggcaacacaatgtagcctctaggacagagcactgagctaaatgcttttctcttcttgagggttcagttttcctaatcatcctaccagctcccaaagctagtcattcgggttagtcaatctctctattcattcatagaatgggcatgatgccagtcaaaggctgtgctgtggccaggacacaggggactccagccaccatgccttaatagaagtggtgccttctgctacccagtcaatgagtggccctcctcttgagaggttatgaaggtcatcttttttgttcaaaagctccagcttattaaaaaaaatacaattagactttttttctcccccaagacagtctcgctctgtcccccagactggagtgcagtgccatgatcttggctcatcgcaacctccacctcccaggttcatgtgattctcctgcctcagcctcctgagtagctgggactacaggcgcgcaccactgcactcagctaatttttgtatttttagtagagatggggtttcaccatgttggccaggctgctctcgaacttctgacctcgagtgatctgcctgccttggcctcccaaagtgctgggattgctggcatgagccactgtgcctggcctacaattaaacctttttaataagtgaaaaagaaattaacagtatttacaaatttaatagtaaatatgtataatcagagtttgaggtatttttcaatgtagacattttctctgcagaaaatttcagagcttccaagaccacaagcttaaaataagtaaagaagacagtaaaattcttaaaaaggctcagaaagatggatttttgcatgagacgcttctggacaggtagctatttatttacttattttcactattttcagtagccaatagaaatggcatgtagaaaacctatattctcttaaattactgtagttttcacatttttgtctttattgctaatttatgagtgtggcaatattacctagagaggacatcatgagtttgggaaaagactgtcaagaaagaatatctaaaaattataacctattctaagtatatattctaagaaattcaggtttgactgtatgtacttcataaatttatcattatctttttataactattagaaccagagttagaaagaagcagtttgactaatataaaaattatgtggattctgttagagtagttcaggttccttaaaataagcatagatcaactaaaaaactaagtataaaagctaaacaagtgaaattgaagcagttttattgtaaggtttggaagagtacaggatgtttatcatagcacattattaatatttattactcttcctatgtagataagtaatgtcctagatttacaacatagaaaaacaggtagagacgtttagctgtgagtgtgcaagtataaatcaattaagtgccagattttgataatcaccagcctctcattcaactcctatgttgcaaagttgctcttatgcttttcttacattacttgataaaggcaatgtttaattacatatttcctattaactagctggtagagttcatacctaaagtcagtaaatgttaagaattttttccagctgagcaaatgagtatgtatctagttgtaagaaatcaagaagaggatataaaatgtaatcaggatgtggactctaaaacggaataacctctatgtcctgtaacttttatcactcgtaataatacagcattctcaccctattaaatggaaatttaaagcacccttaaattccagaataattaaaattgctatttggattgaaaaagcccttaggcaacatttattgaatattgggaaataacttatataagattagaatccattttttatcgaaaccaaatttgaaagtatacatattttaatataactgctgtggtaatacagtaaccaaaattgaacacacagttttaaagctttttatatttagtagcagttgaatatatatggcatgttttacttagattaattttactatttttctttgtttaaacaagagaaccaaattgaaagctgacagatactgcaaatgactgggatttttgtttctgccttatctttttgtgttttttttctgaataaaatattcagaggaaatgattttacagagttcttgagttgttgtgaaattattatttagctagtacctagtttaaccaggattaaacaagtttaatcaggattcttcatggatgtactttttagctaactaaagcttttcacatggaaattaaacttacagtacacacttaacataccacagaatttttttctggatttcctgtcctgaagcatgaagtgtagtagaaaccaattcttcctgcgctacttgtggaatctttcttactggatcataatcttacttactttatacaatagatgcttaatcagtgcctttaataggaagttagaaactcccaatcccatcaacaaggctttgattctacctcctaagtagtatccagattgcagacaatccaaatatcagaactaggggcccgggcagagaggacaaatcatctattagggagtgagacagaaagtagaaacattacaaaggagcaagtagtctcagaacagaggggagagtagttctgggaaaactccctaatgaggacaggtttgccacagtggatatgtatgtgatgcttttgtcctcgtgggctggaatgcaagctgataaagaaattcagacgctatgtgttgcttaggtctgctttgttgaagcctgtctctttcagagttcctaaacaatatttccgtggcatctaatcccagtgagtgctccaaatccaggctgtgtatcagatgccacgggaaattctgcctcaggactgaggttggttcaagcatctggatgatatcaaaagtccacgttgtgtgctggcctaacttgaaagaccctatctagttctagcctttaaattccttctgtcaccaaatctgaagttacatggcatctgtacaagctaggtagctgaggcatgggatcagccctttaaaggagcttttggagcttttgttgtaggtccagctccaacttggcactccagttccaatagctggactttctctcatcgtgtgttctgatccttggattgggagcaaagtaaccacactgatcccacaaagcagtggttccagttcccaactggtgactattttgcctcccaggggacatttttggttttcccaactggaatacggggttagagagtagaggctagggatgctgcgaaacacgtggcagaatcctgttccaaccagaatgctaacagtgccaaggttatggagccttcccacccaagggcttggcctatttcttgcttttgccagctccctaacccttaaacacaacagttcaaatctatatgcataagcatctcctagggacctgcacgtttccaatatcgactactgagacccatccgtagagatacaggcttaggaggtctaggattgggctcaaaatttgcattttaacaagtactctaggtcattctgaagcaagtgatacaaaccacagaatgaggaacaccgccttcaagagactgaatcttgcttcccaacactagcttgctatctgagaccatctgcctgctgactggcttcgtggcacaaacattctgcacgtaggcacagtgtgttcctggactccatgtcaacccgttcaccctcatgttcccttggtttctgtccccagtccagcgagcagaactgattacagatcttgacaacagaagatacagatttaaaataacttgcctgttcccgtggactttatccactagtggaggaggacaagtggacaaggggaaagggtaggtgggggcttcttccccattcctcccattccactttatacaaaccccagctagaccactgggagagcaacggaggttaagaatgacttcatctaaatattgtcatctggtccactcttctttcatcttgtacacaagaatatcatgagttttgcttaaagcactactgaaaccaagataaactctgcttagcatgcccctgacggatcagtctagtaatcttatcaaaaccaagactacctaaaagcactaatcaaaggaaaagctccctcaccccaacttatgactgctcacatttttcagattgaatcatttcaattgtattttaaggttcattgactctttaccacctccaagctgctcctgaacacaactgattgttattttttaattttgaaaactttctcacttctagaatttccactttagcctttgttattattgtagtttcttcttctctgctgtgatttcctatccatttattttacgggtttttggggttttgattttagtaagaattacaataactactttaaaaatccacactaattccaacatctgcgtcatctcgaggtcagtctctattgattgcctttttctttgaatgtgtttctttatatttttgatataatgggattgaattctgaagattgtaaaactagattttgttttgttcctctgaaaattttgattttttttgttgtatttgttgtattttgtttgattttttttctattgtatactttacaatatattttcctctaatggttttaacatttctatttctcaaaatatttatgtttatgttaaaaattatacaaattaacttggtgcagtggctcccatctgtaatcccagaacttttagaggcctaggcaggagggtcactcaagcccaggagttggaaaccagcctagacaacagggcaagaccctgtctccacaaaaaattattagggcggtgcaaaaagtaattatgggtttttccattactttcaatagcaaaacccacaattactcttgcaccaaactgataaaaaaaataagctgggtatggtggtggcgtgtgcctgtggtctcagctatttgggaagtgaaggcagaggtgggaggattgcttgagcccaggagttccagaccagcctgagaccctgtctctatgagaaaaaaaaaaaaaaaaattagctgggcccacgtacctgtggtacaaatacttgggagtcaaaggcagaggtgtcagaatcacttgagcccagaagctcaaggctgcagggcattgtgattgtgccactgcactccagcctgagtgatggagcatgaccctgactccaaataataataataattacaaaaaggaaagacctagaacaccaggttagggttaagtattctaaaattcagctgacttactctgttcactataaagcaggttgccacagaaaatataacatgcccagttaatttgaaatttcagataaacaaatgcttttttcagtgtaagtatatcccatgcaatatttgggacatacgtatactaaaatattattccttgtttatctgaaattgaaatttaactgggtattacataattatagcagcctgaccataaaagatatgagctgagcaaaattctattttaagcttcaagctttatcataaatgtattattaatcaagaactattatttactgagacctgtgtagatccccgtatttatctttttaaatgtggaaataggaaagctacataaagaacatttatagaaataaatgactgttctatagctgaaaggaaaactctagcttttatttttctccccgaacttaaggtttattctacatttgtataaataataaaattacagctcaactttggaagcacagatcataatataaaaataaagcaaagatcccagaaacatttaacaggcaacaaatctttcacatcatcttactataccaaataaacatataataacttagaatgatccattaattataagtaaagaataaattcttttacaaagcataactattaatattattgaccatcataagagcaaatattttaagtaaaacaccatgaatactttacagaaaggagcgagttgcagacacagtcattcttggatttgtttcaacaccaggctttcttcccttttgacctgaactgggagttgaatatttcctctctttgccctctgaccctctagtctctgaaacatcttttgtactagaggtatgtgcagagacttcctggaaatttggatttgtaaattgtgctgttgtatcttctaggcactgcagtgatccagatatagagctgttgctcttgcttgtataagtgtgacatgttgattcaaaaaaggaagtaaaaggaagagagttgattacatttggctactgacattaataataataaacaataattgtacttgtaatataaacatctgaaagttttagttctaagaatgggtgtccacataagaaaattatgtaaaaataattaatgtctattgtaattacttttctttaaccaaagaaaaagtataatttaaagatggctgtttaaggatcaaattgcagcaattggtaaaagtagatattagtcatatttattaagtgacacacagtgatactgaaggcacttatttctcaagaaacatcattttttccaaacaagaacatactacgtcctagacatgaaatgaaaataaactttaattttcaccacaggagggcaacaatcagagagctgaggtggtaccgatccattagaggaccatatccatgagtctatcggttcctactgtaggacagagcaagaatttttaaagaatctcggtgaaggctccttttcaaaaaaatacaaagattaaagcctttgaaacgtaaattattttttccagttattacattgaggacaaagttatagttgcaaagttaagatttttataactatccttaaaattgattctcagcgactcccttgatctacatatgttaaggaaaaaggcaagataaagatgtgttaaatattttccagtttttaataatcagctttaatataaggtatacccaaataatggttaattaaatgacaatgaaagtatgttatagcagatgttcacttatcaacatgccttgaaattaaaggtttataagatgcataagggcaaagtttttgatgttgccattacattcacgaaagtatctcaggcacgtacagcatgaagttcactaactgcttgcaacataaccagcactaaattttgttgaataaataaatgaatacttttgtatagcatctgttcaaaatctctgatgtaaaaatgaaaataatctgaaaatatgcaaaactgaaatttcccacatacggctgccaattcgtacaaacaataagatgaatttcaaaatgagaacatgacaataaaatcaagtttcaaaatggctggctttttttagcattacccatgttcaaaaaaaggaataagacatcaaatgttttgagaaccaaaatttcactgatgcttttctcacaccttgttgttaacctaagcccccatgctcttactgtcaataacagattttcatcataaaacacaagaaacaggccgggtgactgtcaataacagattttcatcatcaaatacaagatagaggccgggcacggtggctcacacctgtaatcccagcactttgggatgctgaggcgtgtggatcacttgaggccaggagtataagacaagcctggccaacatggtgaaacctcttctctactaaaaatacaaaaattacctgggtgtggtggcaggcgcctgtgatcccagccaatcaggaggctgaggcaggagaatcgcttgaacctgggaagtggaggttgcagtgaactgagatcgatccactgtactccagcctgagcgacacagcaagactccgccttaaacaaataaatacacaacataacagaaactctgggacacattcaaagcagtgtgtagagggaaatttatagcactgaatgcccacaagagaaagcaagaaagatccaaaacttacaccctaacatcacaattaaaagaactagaaaagcaagagcaaacacattcaaaagctagcagaaggcaagaaataactaaaatcagggaagaactgaaggaaatacagacataaaaaacccttcaaaaaattaaggaatccaggagctggttttttggaaagatcaacaaaatcgatagaccactggcaagactaataaagaagaaaagagagaagaatcaaataggtgcaataaaaaatgataaaggggatatcatcactgatcccacagaaatacaagctaccgtcagagaatactacaaacacctctatgcaaataaactagaaaatctagaagaaacggataaattccttgacacatacatcctcccaagactaaaccagaaagaagttgaatctctgaatagaccaataacaggctctgaaattgtggcaataatcaatagcttatcatccaaaaaagttcaggatcagatggattcacagccgaattctaccagaggtacaaggaggagatggtaccattccttctgaaactattccaatcaacagaaaaagagggaatcctccctaactcattttatgaggccagcatcatcctgattccaaagcctggcagagacacaaccaaaaaagacaattttagaccaatatccttgatgaacattgatgcaaaaatcctcaataaaatactggcaaaccgaatccagcagcacatcaaaaagcttatacaccatgatcaagtgggcttcatccctgagatgcaaggctggttcaacatatgcaaatcaataaatgtaatccagcatataaacagaaccaaagacaaaaaccgcatgattatctcaatagatgcagaaaaggcctttggcaaaattcaacaaaacttcatgctaaaaactctcaataaggtattgatgggacatgcctcataataataagagctatctatgacaaacccacagccaatatgctgaatggacaaaaactggaagcattccctttgaaaactggcacaagaccgggatgccctctctcacaactcctattcaacatagtgttggaagttctggccagggcaatcaggcaggagaaggaaataaagggtattcaattaggaaaagaggaagtcaaattgtccctgtttgcagatgacatgattgtatatctagaaaaccccattgtctcagcccaaaatctccttaaactgataagcaacttcagcaaagtctcaggatacaaaatcaatgtacaaaaatcacaagcattcttatacaacaataacagacaaacagagagccaaatcatgagtgaactcccattcacaattgcttcaaagagaataaaatacctaggaatccaacttacaagggatgcgaaggacctcttcaaggagaactacaaaccattgctcaatgaaataaaagaggatacaaacaaatggaagaacattccatgttcatgggtaggaagaatcaatatcatgaaaatggccatactgcccaaggtaatttatagattcaatgccatccccatcaagataccaatgactttcttcacagaaatggaaaaactactttaaagttcatatggaaccaaaaaagatcccgcattgccaagtcaatcctaagccaaaagaacaaagctggaggcatcatgctacctgacttcaaactatgctacgcggctacagtaacggaagcagcatggtactggtacccaaacagagatatagatcaatggaacagaacagagccctcagaaaaaaatgccacatatctgcaaccatctgatcttctaacaaacctgacaaaaacaagaaatggggaaaggattccctgtttaataaatggtgctgggaaaactggctagccgtatgtagaaagctgaaactggatcccttccttataccttatacaaaaattaattcaagatggattaaaaacttaaatgttagacctaaaaccataaaaaccctagaagaaaacctaggcaataccattcaggacataggcatgggcaaggacttcatgtctaaacaccaaaagcaatggcaacaaaagccaaaattgacaaatgggatctaattaaactaaagagcttcttcacagcaaaagaaactaccatgagagtgaacaggcaacctgcagaatgggagaaaattttctcaacctactcatctgacaaagggctaatatccagaatctacaatgaactcaaacaaattgacaaaaaaaaaaaagataaacaaccccatcaaaaagtgggcaaaggatatgaaccgacacttctcaaaagaagacatttatgcagccaaaaaaacacatgaaaaaatgctcatcatcactggctatcagagaaatgaaaatcaaaaccacaatgagatatcatctcacactggttaaaatggcaatcattaaaaagtcaggaaacaacaggtgctggagaggatgtggagaaataggagaacttttacactattggtgggaatgtaaactagttcaaccattgtggaagtcagtgtggcgattcgtcagggatttagaactagaaataccatttgatgcagccatcccgttactgggtatatacccaaaggactataaatcatgctgctataaagacacatgcacgcgtatgtttattgcggcactattcacaatagcaaagacttggaaccaacccaaatgtccaacaatgatagactggattaagaaaatgtggcacatatacaccatggaatactatgcaggagaaaaaaatgaagagttcatgtcctttgtagggacatggatgaaactggaaaccatcattctcagcaaacaatctcaaggacaaaaaaccaaacaccgcatgttctcactcataggtgggaattgaacaatgagaacacatggacacaggaaggggaacatcacacactggggactgttttagggtggggggagtggggagggattgcattaggcgatatacgtaatgctaaatgacgagttaatgggtgcaggacaccagcatggcacatgtatacatatgtaacaaacctgcacattgtgcacatgtactctaaaacttaaagtgtaataaaaaaaaaagtcaagaaacaacagatgctggcaaggctgtggagaaataaacacttttgcactgttggtaggaatgttaatttcttcaatcattgtggaagacagtttggcaattctgcaaagatctagaaccagaaataccatttgacccagaaatcccattactgggtatatatccaaaggactataaatcattttattataaagatgcatgcacgcgtatgtttatagcagcactattcccattagcaaaaacaaggaatcaatccaaatgcccatcagtgatagactggataaagaaaatgtggtacatacacaccatggagtactatgcagccataaaaaggaatgagatcatgtcttttgcagggacatgaatgaatctggaaaccatcatcttcagcaaactaatacaggaacagaagaccaaacaccacatgttctcactcataagtgggagctgaataatgagaacacctggacacagggaggggaacaacacacactggggcctgtcactggggatggggaagaagagcatcaggataaatagctaacgcatgtggggcttaatacctaggcacctaggctgtgggttgataggtacagcaaatcatcatagtgcacgtttacctatgtaacaaacctgcatgtcctgcacatgtatcctggaacttaaaataaaattttaaaaaataaaaagataacaagagtactgaaaattggctcacagttccacagcctgtacagcaagcatgatgctgacatctgctcagcttctgcggaggcctcaggagacttcataatcatgttggaagggaaagcaagagcaggaggaagagagagagggggaaggtcctacacactttaaacaacaagatctcatgagaactctatcacaagagcagcgctagggtaattatgcttatctattagaaagtgctcccatggaccagccacctcgcagcaggccccatctccgaaagtgggaaccactggaggctgctcccatggaccagctaccttccagcaggccccatctccaacactgggaaccactggaaactgctcccatgcaccagccacctcccagcaggccctatctccgacactggagattacatttctatagaagtttccaataattttggaacacatattaataacatttagaaaaatacagtccaaagtagcccaaacatcattcactcttctatttgaaagttttccctctattgtaatgtcacaatctccagcgttattaatcagaatcctgcatttaagggcatctgttaaattttatagctgattataaaaccatcatttaaagaggaccaaaatgagacaattttctgtggatgacaaaaacattaagggcagccacagttaaagacatgaacaacagcctttaaagtagaatttgctgtagagcctactatgtgggagatatttctagttattacctcttttattctaaaccatggaaaaattacctgtcaaataaagtccttctagaagagtgaagggctcctggcaatgttctctttaatccatgatgtgggataaggggagtttttactaattatgaggcaatgtatataccactaaagtttcaataccacaaaaggaaaaaaaagggggggagggaagtcctggaagaaccagatggagccgtagcagaaggtgatttcaatccactgacccctgaattgtgggctggttgtgctgcatcgctctgtgacttatgattctgccacaacaaagatctaattcccagggttataggaaaagacacctgtggtacccctgaggcagagagaagggagaaatccaaacctgacttaagtctagggttcttaagccacacaatctgctcacaaggaggaccttaactctgaagatactgatttggggctgtttcaaagaaagaaattataaatatgagtgggaaagagaacaaccttccccatatccagtggcaaaaaaaatgagagagagagaaggaaggaaggagggaaggaaggagagagggaagaaaggagggaaggaaggagagagggaaggaaggaagggaaggagggaggtagggatggaaggaaggaaggaaggagagggaaggaaggaatgaaggaaggagagagggaaggaggacaggaaggaaggaaggaaagaaggaaggagagagggaaggaaggagggagggagggagggaagggaggaaggagagagggaagtaaggagggaaggaagaaaaggaaggaaagagggaaggaatgaaggaaggaaagagggaaggaaggaaggaaagatggaaggaaggaaggagggaaggaaggaaggaagggaaggaacttggatatgcacaaaaacaaaatttaaattaaaacggaagtctatcatctgacctaattggaaatgtactattttctaaaataacttatacagtccaaaggtaaaaggatgctgattggtatttgtaactctccagcatatattcgaatcaattttaacatctgctgaaatctaccaattggcataccttcacaaacttaataaatactggagctcaaactttgttatacctgtgatttcactaaatttaaacattgcatcccctaatcctagcagagtaactgcatctagaatagaggacacatagttatgcctcacatttgttaccttgactaaatttcccgtagtcatagaagcctttgtccgtaggggacatggatgctcttacctaatgagtaacaaattgatattaaatcatttgagcttacacattgacttcaccaaatgtaaccttacagaactccctctcctgtttttttttatttgatttatttttaatttttcattttttttagagatggggttttgctccattacccaggctgaatcaagtgcggtggcacaatcatagctcactgctgccttgaactcctgggctcaagcaatcctcccattttagccttccaagtagctgggattacaggcatgcaccagcacagccagttaaaaaaaattatagaagtggagtcttgctatgttgcctaggctggtctctaacttctggcctcaagcaatcctcctgcctcggcctcccaaagttctgggattacaggtgtgagccaccgtgcctagcctccccatcttgataaattatcaaatatgatccaacataaattacaacatgacttcaaataaataaaacttactatataatacctatttaattagtgaaggggtgataatcctcattgcttcaacgtttagcagtagaatttgtcctgttcttaaacctgcaaataataaatagtgtttcacagtggattactgtaatgtgactgcagtgatcccatccattcagaccctcatacccaatgcctaatattgtggttaattttttttttatttcaataggtttttggggaatatgttggttttctttttatttcaataggtttttgggaaacaggtggtttttggttacaggaataagttatttagtggcgatttctgagattagtggtgcacgcattacccaagcagtgtacactgtactcattgtgtagtgttttatccctcaccgcacccaccccaccactcccagcctttccctgagtccccgaagaccattgtatcattcttatgcctttgcatcctcatagcttagctctcacttatgaatgagaacatacaatgtttggttttccattcctaagttgcttcacttagaataatggtgtccagtttcatccaagtggctgtgaatgcattatttcattccatcttatggctgagtagtatttcatgtggtaaatatttataccacattttctttatccacttactgattaatgggcatttaggctgacttcaaattcttctaattacatattgtgctgctatgaacatgtgtgtgcaagtatctttttaatataatgacttattttcctctgagtagatacccaggagtggaattactggatcaaatgatagatctgcttttacttctttggaaatctcctcactgttttccatagctgttgtactagtttacattccctccaaaaagtgtaaaagtgttccctttttaccacatccatgtcaacatctattagtttttgattttttgattatgaccattcttgcaggagtgaagggatgtcatattgtattgtggttttgatttgcatttccctgataattagttatgctgagcattttttcatgtgtttgttggccagttgcttatcttcttttgagaattgtctgttcatgtccatagcccactttttgatgggatgtttttcttgctggtttgtttgagttcctgcagattctgggtattagtcctttaatcagaagtacagattgcgaagattttctcccactctgtaggttatctgtttactctgctgattatttctcttactgcgcagaagtcttttagtttaattaagtctcatctatttatctttgttttagttgcatttgctttttggattattggtcatgaagtctttgcctaagccaatgtctagaaggttttttccaatgtcgtcttctagaatttttatggtttcaggtattagatttaagtccttgatccatcttgagttgattttcgaatagggtgagaaatgagcatccactttcattcttctatgtgtggcttgccatttatctcagcaccatttgttgaatagggtattctttctctgctttatgttttcgtttgttttgttgaagattagatgactgtaagtatttggctttatttctgtgttctctattatgttccattggtctttatggctatttttataccagtaccatgctgttttggtgactatggccttctagtgtagtttgaagtcagcttctagatttgttatttttgcttagtcttgctttggctatacagactcttttttggttctaggcttttactaccttaaggtatgtcccttctatgtcttttttagttctgtgtgaatttttgtagttctgtgaagactgatgttggtactttaatggggattgcattgagtttgtagattgcttttggcagtatggtattttcacaatattgatgttacccatccgtgagcatgggatgtgtttccatttgtttgtatctatgatttctatcagcagtgttttgtagttttccttgtagaggtcttttgtctctttggttaagtattctggatataattaagatgtggtctgcaaagattgcctgcaattgacaattataggaatatactattataattataggaattataatattcctaagggttttattgcagctattgtaaaagagagtgggttttttatttaattctcagcttgttcactattactgtatagcagagccactgacttgtgtacattttttatcctgaaactttgctgaaatcatttaccacttctagtagcttttgggatgagtctttagggttttctaggtatacgatcatgtcatcagcaaagagtgacagttcgacttcctctttacctatttggatgccctttatttctcttatttgattgctctggcgaggacttctagtactatgttgaatagaagtggtgaaagttggcatcattgtcttgttccagttctcagggggaatgcattcaacttttccccattccacataatgttggctgtgtgtttgtcatatatggcttttattaccttaaggtatgtcccttcgatgttgattttgctgagggttttaatcataaagggattctggattttgtcaaatgctttttctatgtcaattttgctgagggttttaagcataaagggatgatggattttgtcaaatcctttttctgcatgtattgagaggatcatgtgatttttgtttttaattctgtttttacggtgtatcacatttattgacttgcagatgtttaaccatcctgcatccctggtttctcttcagatcgtgtacctctttcaccttatgatggttaattttatttgccaagttgggttgcctagatatttggttaaacactctggatgtgtctgtgagggtgttccttgatgagacaaacatttgaatatgtagacttagtaaagtagttaccctccccagtgtgagtgggcctcatccaatccattaaatcccaaataaaacacaagggtagaggaagagagaattcactctctttgattatttcagagctgagacgtagatcttctctcgcctttgaagtcagacgtggactgtaacttatgccatcagctttcctgattctcggacgttaggcttgtactggaactccaacattggcagtcctagttctccagcttgctgactgcaggtcctgggacttcttagcctccataaccacatgagccaattccttacaataaacctatatatattcatgcaactgataaaatattttgttgttacagatttggctaccatgttatttttgtgcctattttaacagagtctcagtcatagtctgccttcatctgtgaagggaccaggcgacccacggagtgccttggcagccgcgtcattgcatgcaatcttcacagacaagatctcactgcaaccacctttctacaggagcacaggtgtgatattatactgatgacatcattctcagagaaaattcattttacaaactaaggacacacagatacaaggaggcttacacaaagggaatggacctttcccaacacagtagtgcaaggccctgccactttgcttcaattcctgaaaattccttggtaaatatggggctgccctattcctgagactttcaaaaaatagttattcatcctctcagcgtctaaaatgttaatacaagcctaatattctttaatctgtgttttgttttttggaggcacagtcttgctctgtcacccaggctggtatgaagtggtacgatttcagctcactgcagcctcgacctgagatcaagcaattctcccatcttagccttccaagtagctaggacttcaggtgtgtgccatgacactcagctaattttgtttatatttttgtagagaaaaggtctcgctatgttacccaggctggtctcaaactcctgtggtgaagcgatcctcttgcctcagcctcccaaagttctgggatcacaggtgtgagccactgtgcccagccctttaattctttacttggggttcaggtgacaatatatttcttatttacaaatcttacttaatctcactgatgctgtcattggcaaactgacccaccttgaatgaagcctcctccaacaagtctggaatctgtccgaatttaaattaacaggtgctcctatgaattccctcagagaacacactgtggacgctttagcaacctcttcctatgcctcctgaagtatctgggttgcatatggtggccataagtagtccatgggcttctgatgtaaaaaaaaaaaactgccccttttgaccctgttctgtacagcatcagggcagtgattgctgaccacatgctggaccctctggaaacagagcgctctgcatccatgtccacgagccttcatgcccatctggtcatcaggccttgggaagaagcaccccacagccttggcacagctgcagagacctccttgcgtcaggatggagtcaaacctggaccccctgccattctcatctgcaggaaacactggcctccttcatcctcagtctgtgttgctggaagtcagccatctccgaggccctttgggatcgactgagtgaccagcagtgaagtttgtccaccttctgaatggatgccatcatctgacgtgatggagcacagtgggatgctgctgtcttccctcgcttagctaggatgtccctgataaaggataacacaaaagcctcagcacaactggccaaacttgaggtggtcatctcagcactgatgctaggccaacaattagccccatttgtacatttttacaaatttttggcaattgccaagaattgtccaccttccctccccattgaattaaagaaacttcttgcctcatggatactcagaatacagtcaaggtaacagatgcctttttttaaccaaggacacagtacggatctcacagggacactccttatcccctgcagagagttccagacactactgatggtgaccaaggcaacatttcatcagaaaacacagtgctaggcttgtgaaagtgtccagtagggcttctactgcccctacaggctgcaggcagctgctttagttgagagatagactgagctcctcaaagaattcctatttaagttacaaagcagcaagtggatgccctgctgggttccactgttgccacaggctttgattactcttaagttcatgcttcttaggaaagtgcactttttacaccaatgctacacagttccctcagttgcctttactggacatcaaggagttcacatttttgacaaccattcagtcccggactgtccaaggggtggaggtagctccgtacaggaagctgcctgctgcgtgtggatcagtaatatcagacttgcccagcaactcactggagacatgaaaaccaatgcatgggggatgcatgacgtcacccaaatatttatgaacacgcttgtgctgccagagaccccagatctctaaaccaatgcatggggaatgcatgacgtcacccaaatatttacgaacaggcttgtgctgccagagaccccagatcacttttcctgcctcctgctaaataaatgggggcagtagatttgcatcggtttccacattacattattcataactgtggccttcctaatttctcatgtccctaagcacttattacaatgtctcagcagctttctgtcagcctctcataatattagtcatcatgaaaataaatgtctgatgttaaagcatcaggggtcaattgtattgtgacacctaaaatttcatgcagcaccccaccatgtcctcagcctaatggctttcatgcccccaccagactgcaaaactctgaattagtcaagcacatccctgaagggaccaggggttaccccaccctctgatttccaccaagcctgcctcccacaccctctgttccagagtgcaaccctgggtagacctgcataaatgcagtgtcatccccctggctgagtatgtgtgacgagtaaattactgggaatttcgtctgctcagtgtttgttttgtctgcagccattcccagaattctaggacaagactagcttctttgccaatggggtgaacaggaaggaaaccaagtaggaattgcctttttaaaaaaatcccttcccaccctcttaattatgtaatgcatggatttttatagcttttttgctcattccattacctgaggtcagccactgatatttaacctatccttagcctcggaggagggcagaggagcattggtcatattgatttcgctagcggtgacatgatttcctcctgtgccactcaaattctctccttctttaacttgatgctcagtaggttgtgtttctctcatctttgtagattgttaggaagatgagaatcagctttcatttttgatgttgccatagagaagactccatggtaatgtttctttgcacaatcaactttttcttttcccccagaaattgcaaattcttatgtgagagacagctttctggagtctgcaaacatagattactgtctctcttttgatagtaaatttattatatccccaccatcaataaaatacttacatataattttgacatgtcatattgattgccaactacacgtaagaacattccttgattttaaatctagactaattatgaaaatttgggtagtcaccaaaaattattgtgcacaaatttatagaccttaggattaaatgagttactattaactaatatttattgtgcagtcagtgtatggcagaaacttattatgtactatttcattttatacttaaaacaatattctatgcaaaatgctataatttcaccatgcctccaatttggacatgataaaactggatctcgtaaagttttcaccccagagttctctgcttagtaagaagtagaagtaagtctaaacctaagttacctgatttcagagcccatgtagttaaatgctctaaatgcagcttcccctggtgatggtgactctgagagcctgtcacatgatgtaggacagtgcttccctgtaacgtgtgcaagattcccgtgatgatggtgactatgagaccctgtcagatactatgtagaacagtgcttccctgtaacatgcacaagattcccgtgatgatggtgactatgacagcctgtcacatatgatgttggacagtgcttccctgtaacatgcacaggattcccgtgatgatggtgactatgacagcctgtcacatatgatgtaggacagtgcttccctgtaacgtgtgcaagattcccgtgatgatggtgactatgacagcctgtcacatatgatgtaggacagtgcttccctgtaatgtgtgcaagattcccgtgatgatggtgagtatgagagcctgtcagatactatgtagaacagtgcttccctgtaacatgcacaagattcccgtgatgatggtgactatgacagcctgtcatatatgatgtatgacagtgcttccctgtaacgtgtgcaagattcccatgatgatggtgactatgacagcctgtcacatatgatgtaggacagtgcttccctgtaacatgcccaagattcccgtgatgatggtgactatgagagcctgtcacatgtgatgtaggacagtgcttccctgtaacgtgtgcaagattcctgtgatgatggtgactatgagagcctgtcacatatgatgtaggacagtgcttccctataacatgcacaagattcaccctggaatcttattaaaatgcaaactcgtagaccacactttgactagctaagacaagagcatttaaatggacgtccaggtgacagtgctaagatcctactgttcatgtgggcactggctcaccatattaacgaagcttaggacctccagtccctgctggaaaagaaatacagatacataggatgtgactgtgcatatggaatgtctgttgtgttctcgacattgtactggacactagacatgaaaagtcaaatatcccttgcctctttctgaaaggagcttcctacacagtggcttctgactgcagtgtatattttctcttctgtcctgggtgggtgagctctatctcaatgttggtaactgaacactgcccagtgggtttgatgggggagaccatagctagctgcgctcccacatagctatgaccatagcatacctcgtgatgccatttccccattgtcagaagcctccctccagtatcatacacgctctccatgattataaattcttcctccttccactaaatgttcctaaatcttgcaaaaataaaaacataaaccacattcttgtcatattagttatatattaatgatgaaagttccttacttttctttcttatttttttgcgacggagtctcgctctgtccccagactggagtgcagtggcgcgatctcggttccctgaaagctctgcctcctgtgttcacgacattctcccacctcagccttccgagtaactgggactacaggcacccaccaccacccctggctaatttttttgtgtttttagtagagacggggtttcaccatgttatccaggatggtcttgatctcctgaccttgtgatccgcaagcctcggcctcccaaagtgctgggattacaggcatgagccaccgcacccagcccaagttccttatttttcatgtgtttaatattttctcccaatttatagaatatattgattaagaataaattttagccatgcacatcttttacaaacttcatgatatactttgccatatttaaatttcttatactcttataaaatgtgtgttctgatctcacgtccatttcttccctctggcttctattagtttaggctatgagcagagatggacgaggtggctactgtaatagatcaaggctataagcagagatggatgaggcagcggctgtaatggattaaggctatgggcatcttatgaagtaggatgtaaaatctgtaaatgtcagaatgaatctaaacttaccaattcaaaactggattgcaaaacagctcaaaaaaagactgaaaacacagctctacaatttaggaggctgaggcaagcagattgcttaagttcaagagttggagaaaagtctaagaaacatggaaaaaccatctctacaaaaaaaaaaaaaagttttaattaggagggtatggtggtatgagcctgtgggtcccagcttttcaggaggctgaggtgagaggattgcttgaggccagaaggtagaggctgcagtgagctctgataatgccactgcatttcagcctaggtgacagagtgggacccgtctcaaaaacaaacaaaaataacaaacaaaaacagctctaaacaaaagtggctagaaaagtagctcaagtttttcctgtctggttaaatagaaacataaatgaactacttatgtgccccagtggcttcataatgctgagaggaaagtcaattattctagcaggttctggaaaactttatcatatcatggggttcaatgaaaatatcaaatcataaatataataatcaaatctgaaagtgaatctagtttcaaagacctcagaagccagtgtgtaggaagctcttttcagatagagacaagggattatttgacttcttatctctgttgtctagcacaatgtccagaacacaacagatattccatatgcacagtcacatcacatgtatgtgtatttcatttccagcaaggactagaggtcctaagctttgtttatttggtgagccagtgcccaaatgagcaggagaatctcagcacagtcacctacacactcatttcaatgctctggccccttatccaagctagtcaaagtgtggtctatggttttgcattttaagggatccctgggtgaatcttgtggctgtcaaaggagaagcactgccctcaaaatatagaaaaggtgaactaatttatacaagcagcctggctgtttatttatgtatgtatttatcttgttgatgggaagattcaaattgatatacacagtcacccccataaggatttcaggtaaaaaacgaacaaagatttagatatcagatgtgttttacaattaccacaccagtctttttactacagaatctagtagcatatttccaatagatctaggtgaaaatttctgtctcatgacccttctgtcagtatttttaaaattggatactctattagtggcaaaattgaatctcttacaggcatctcactcaaactgcagtcatactttccaataggccccataaaaatccttgttctggagcaatctaatacatttatccacctctttagacacttaggtaagtataataatacaagttttgtgtgtgtgtgtgtgtgtgtgtgtgtgtattgtgtaccttgttgcctcttgtccactttctgcaacacctgaatctgaggcaagtttaatgtaaataacgtccagcaatgttagaaatgtttacttttatgtgcccatcaggaaaaaatgatgaatgttattgtagaggaaattttcattctggaaaaaatgcatactgtttgaatgttactttcatgctttccacagatattatacacagatattatattccaaggattatgtttcaaagtcttcaaaaatagaaaattcattttatatttctagctgaaaataataacaataattagcctacctttggggaaatgtgataaaaatactaatgaacatcacaactcattaaaagcataaaatgtgcaatgatttaaactacatgttctttctatgaatctgcgtagaaatatagacacatttgataaatgatatttaaagtctgagtgctttggtaaatgattcatctataggttgaaaggactacttttatctgccttcatagtgagaattagatttcnnnnnnnnnnnnnnnnnnnnnnnnnnnnnnnnnnnnnnnnnnnnnnnnnnnnnnnnnnnnnnnnnnnnnnnnnnnnnnnnnnnnnnnnnnnnnnnnnnnnagaattctgtgaaactactttctgatgtttgcatccatctcacagagtagaacctttcttttgattgagcagttttgacacactctttttgtaggatctgcaagtggatatttagagcgacttgaggcctattctgggtagggaaatttcttcaaataaaaactacccagaaacattctgagaaactactttatgatgtgttcattcatctcacagagtagaacctttctttggattgagctgttttgaaacagtctttttttcgaatctgcaagtggatatttggagccttttgatacctatagtggagaaggaaatatcttcacataaaaactatgcagaagcattctgagaaacttctttgtgatctgtgcattcatctcacagtgttgaatctttcttttgatacagaagtttagaagcactctttttttagaatccgcaagtggatatttggagccttttgaggcctatagtggagaaggaaatatcttcacataaaaactatgcagaagcattctgaaaaacttctttgttacgtgtgcattcatgtcacagggttgaacctatctaatgattgagcagttttgaaacactcattttgtagaatctgcaagtggatatttggagcgctttgagaccttccgtggacaagctaatgtcttcacataaaaactacactgaagatttctgaggaacatctttgtgaattgtgcacctaagtcacagtgttgaacctatcttttgattcagcagtttggaatctctctttttacagaatctgagagtggatatttggagcgctttgaggcatactgtggaaaatgaaatgtcttcacacaaaaactacacagaagcattcagagaaccttctttctgatgagtgcattcatcacagagttgaacctttgttttgatttagcagttttgacacaatctttccgtacaatctggaagtgaatatttggagggctttgagatctgttttggaggaggagatatcttcatataaaaactacacagaagcattctgtgaaacttatttgcgatgtgtgcattcaactcacattgttgaaggtatctgttgattgagtagtttagaatctctgtttttgtagaatctgcaagtgaatatttggggccctattttgccctatattggaaaaggaaatatcttcaaatagaaactacacagaagcattctgagaaactactctgtgatgcgtgcattcatctcacagggtacaacctttctttggattgagcagttttgaaacactctttttgtagaatctgcaagtggatatttagagtgatttgaggcctattgtggaaagggaaatttcttcaactaaaaactacccagaagcattctgagaaacttctttgtgatctgtgcattcatctcacagagttggatgtttctattgatacagcagttttgaaacactctttttttagaatctgtaaatggatatttggagtcttttcaggcctacagtgtagaaggaaatatcttcacataaaaactacacagaagcattcggcaaaacttatttgtgatgtgtgcattcatctcacagagttgaatgtctctgttgattgagtagttttgaaacactctttttgtagaatctgcaagtagatatttggagctcattggggcctactgtggaaaaacaaataacttctcataaaaactacacagaagcattctgagaaacacctttgtgagttgtgcactgaagtcacgttgttgaacgtatcttttgattcagcagttttgaatctctctttttacagaatctgagagtggatatttggagcgctttggggagtactgttgaaaatgaaatatcttcacacaaaaactacacagaagcattcagagaaacttctttctgatgagagcattcatcacagagttgaacctttgttttgatttagcagttttgagacaatctttccgtagaatctggaagtaaatatttggagggctttgagttctgttttggagaaggagatatcttcatataaaaactatacagaagcattctgtgaaacttatttgtgatgtgtgcattcaaccaaaaatgttgaaagtatctgttgattgagcagattagaatctctctttttgtagaatctgcaagtgaatatttggagccctatttcgccctatagtggaaaaggaaatatcttcaaatagaagctacacagaagcattctgacaaactactttgtgatgtgtgcattcatctcacagagtagtacctttctttggattgagcagttttgaaacactctttttttagaatctgcaagtggatatttagagcgatttgaggcctattgtggaaagggaaatttcttcaaataaaaactaccctgaagctttatgagaaacttctttgtgatctgtgcatccatctcacagagttgaatctttcttttgatacagcagtttggaaacactatttttttaggatctacaagtggatatttggagccttttgaggcctatagtggagaaggaattatcttcacataaaaactatgcagaagcattctgagaaacttctttgtgatgtgtgcattcatctcacagagttgaatgtctctgttgattgagcagttttgaaacactctttttatagaatctgcaagtggatatttggagttcattggggcctgctgtggaaaaacaaatatcttcacataaaaactacacagaagatttctgataaacacctttgtgaggtgtgcactgaagtcacagtgttgaacctatcttttgattcaccagttttgaatctctctttttacagaacctgcgagtggatatttggagcgctttgaggcgtactgtggaaaatgaaacatcttcacacaaaaactgcacagaagcattcagagaaccttctttctgatgagtgcattcatcacagagttgaacctttgttttgatttagcagttttgacacaatctttccgtagaatctggaagtaaatatttggagggctttgagttctgttttggagaaggagatatcttcatataaaaactatacagaagcattctgtgaaacttatttgtgatgtgtgcattcaactcacaatgttgaacgtatctgttgattgagcagattagaatctctctttttgtagaatctgcaagtgaatatttggagccctatttcgccctagagtggaaaaggaaatatcttcaaatagaaactacacagaagaattctgcgaaactactttctgatgtttgcatccatctcacagagtagaacctttcttttgattgagcagttttgacacactctttttgtaggatctgcaagtggatatttagagcgacttgaggcctgagctgggtagggaaatttcttcaaataaaaactacccagaagcattctgagcaaactactttatgatgtgttcattcatctcacagagtagaacctttctttggattgagctgttttgaaacagtctttttttcgaatctgcaagtggatatttggagccttttgagacctatagtggagaaggaaatatcttcacataaaaactatggagagctgggcgcggtggctcacgcctgtaatcccagcactttgggaggccgaggcgggcggatcacgaggtcaggagatcgagaccatcctggctaacacggtgaaaccctgtctctactaaaaaaaaatacaaaaaattagccgggcgtggtagcgggcgcctgtagtcccagctactcgggagggtgaggcaggagaatggcgtgagcccgggaggcggagcttgcagtgagccgagatcgcgcctctgcactccagcctgggcgagagagcaagactccgtctcaaaaaaaaaaaaaaaaaaactacacagaagnnnnnnnnnnnnnnnnnnnnnnnnnnnnnnnnnnnnnnnnnnnnnnnnnnnnnnnnnnnnnnnnnnnnnnnnnnnnnnnnnnnnnnnnnnnnnnnnnnnnagcattctgagaaacttctttgtgatggctgcattcatgtcacagagttgaatgtctctgttgattgaacagttttgaaacactctttttgtagaatgtggaagtggatatttggagctcatttggtcctactgtggaaaaacaaatatcttcacataaaaactacacagaagcattctgagaaacttctttgtgatgggttcattcatctcacagagttgaatgtatctgttgattgagcagttttgaaacactgtttttgtagaatctgcaagtggatatttggagctcattggggactactgtggaaaaacatatatcttcacataaaaactacacagaagatttctgagaaacacctttgtgaggtgtgcactgaagtcacattgttgaacctatcttttggttcagcagttttgaatctctctttttacagaacctgcgagtggatatttggagcgctttgaggcatactgtggaaaatgaaatatcttcacaaaaaaactacacagaagcattcagagaaccttctttctgatgagtgcattcatcacagagttgatcctttgttttgatttagcagttttgagacaatctttcggtagaatctggaagtgaatatttggagggctttgagatctgttttggagaaggagatatcttcatatattaactacgcagaagcattctgtgaaacttatttgtgatgtgtgctttcaactcatattgttgaacgtatctgttgattgagcagtttagaatctctctttttgtagaatctgcaagtgaatatttggagccctatttcgccctatagtggaaaaggaaatgtcttcaaatagaaactacacagaagcattctgagaaaccactttgtgttgcgtgcattcatctcacagagtagaagctttcttttgattgagcagttttgaaacactctttttgtagaatctgcaagaatatatttagagcgatttgaggcctattgtggaaagggaaatttcttcaaataaaaactacccagaagcattctgagaaacttctttgcgatctgtgcattcatctcacagagttgaatctttgttttgatacagcagttttgaaacactctttttttagaatccgcaagtggatatttggagccttttgaggcctatagtggagaaggaaatatcttcacataaaaactatgcagaagcattctgagaaacttctttgtgatgggtgcattcatctcacagagttgaatgtctctgttgattgagcagttttgaaacactctttttgtggaatctgcaagtggatatttggagctcattggggcctactgtggaaaaacaaatatcttcacataaaaactacacagaagatttctgagaaacacctttgtgagttgtgcactgaagtcacagtgttgaacctatcttttgattcagcagttttgaatctctctttttacagaacctgcgagtggatatttggagcgctttgaggcgtactgtggaaaatgaaatatcttcacacaaaaactacacagaagcattcagagaaccttctttctgatgagtgcattcatcacagtgttgaacctttgttttgatttagctgttttgagacaatctttccgtaggatctggaagtgaatatttgtagggctttaagatctgttttggagaaggagatatcttcatataaaaactacacagaagcattctgtgaaacttatttgtgatgtgtgcattcaactcacattgttgaacgtatctgttgattgagcagtttagaatctctctttttgtagatactgcaagtgaatatttggagccctatttcgccctagagtggaaaaggaaatatcttcaaatagaaaccacacagaagcattctgagaaaccactttgtgatgcgtgcattcacctcacagagtagaacctttcttttgagtgagcagttttgaaacactctttttgtagaatctgcaaatggatatttagagcgatttgaggcctattgtggaaagggaaatttcttcaaataaaaactacccagaagcattctgagaaactactttgtgatgtgtgcattcatctcacagagtagaacctttctttggattgagcagttttgaaacactctttttttagaatctgcaagtggatatttggagccttttgaggcctatggtggagaaggaaatatcttcacataaaaactatgcagaagcatcctgagaaacttctttgtgatctgtgcattcatctaacagagttgaatctttcttttgacacagcagttttgaaacactcttttttcagaatctgcaagtggatatttggagccttttgaggcctatagtggagaaggaaatatcttcacataaaaactatgcagaagatttctgagaaacacctttgtgagttgtgcactgaagtcacagtgttgaacctatcttttgattcagcagttttgaatctctctttttacagaacctgcgagtggatatttgtagctcattggggcctactgtggaaaaacaaatatcttcacataaaaactacacagaagcattcagagaaccttctttctgatgagtgcattcatcacagagttgaacctttgttttgatttagcagttttgacacaatctttccgtacaatctggaagtgaatatttggagggctttgagttctgttttggagaaggagatatcttcatatcaaaactacacagaagcattctgtgaaacttatttgcgatgtgtgcattcaactcacattgttgaaggtatctgttgattgagtagtttagaatctctctttttgtagaatctgcaagtgaatatttggggccctattttgccctatattggaaaaggaaatatcttcaaatagaaactacacagaagcattctgagaaactactttgtgatgcgtgcattcatctcacagggtacaacctttctttggattgagcagttttgaaacactctttttgtagaatctgcaagtggatatttagagtgatttgaggcctattgtggaaagggaaatttcttcaactaaaaactacccagaagcattctgagaaacttctttgtgatctgtgcattcatctcacagagttggatgtttgtattgatatagcagttttgaaacactcttttttagaatctgtaaatggatatttggagccttttcaggcctacagtgtagaaggaaatatcttcacataaaaactatgcagaagcattcggcaaaacttctttgtgatgtgtgcattcatctcacagagttgaatgtctctgttgattgagtagttttgaaacactctttttgtagaatctgcaagcagatatttggagttcattggggcctactgtggaaaacaaataacttctcataaaaactacacagaagcattctgagaaacacctttgtgagttgtgcactgaagtcacgttgttgaacgtatcttttgattcagcagttttgaatctctctttttacagaatctgggagtggatatttggagcgctttgaggcgtactgtggaaaatgaaatatcttcacacaaaaactgcacagatatattctgagaaacttctttgtgatgtgtgcattcttctcacagagttctacctttattttgactgagcagttttgagactctttccatagaatctggaagtgaatatttggagggctttgagatctattttggagaaggagatatcttcatatcaaaactacaaagaaacattttgagaaacttctctgtgatgtgtgcattcatatcacagggttgaaactaccttttgattgaacagttttgaatctctctttttgtaccatctgcaagtgcatatttagagccctttgaggcctatggtggaaaatgaactatcctcaaataaaaactacacagcagcattctgagaaactactttgtgatgtgtgcattcatctcacagttttagacgtttcttttgattgagcagttttggaatactctttttgtagaatctgcaagtggatatttggagccctatgagccctatggtggaagaggaaatatcttcaaatacaaaatacacagaagcattctcagaaacttctttgtgatctgtgcattcatgtcacagagttgaatctttcttttgatacagcagttttgaaacgctatttttttagaatctgcaggtggatatttggagccttttgaggcctatagtggagaaggaaatatcttcacataaaaactatgcagaagcattctgagaaacttctttgtgatgtgtgcattcatctcacagagttgaatgtctctgttgattgagcagttttgaaacactctttttatagaatctgcaagtggatatttggagttcattggggcctgctgtggaaaaacaaatatcttcacataaaaactacacagaagatttctgataaacacctttgtgagttgtgcactgaagtcacagtgttgaacctatcttttgattcaccagttttgaatctctctttttacagaacctgcgagtggatatttggagcgctttgaggcgtactgtggaaaatgcaatatcttcacacaaaaactgcacagaagcattcagagaaccttctttctgatgagtgcattcatcacagagttgaacctttgttttgatttagtagttttgagacaatcattccgtagaatctggaagtgaatatttgtagggatttgagttgtgttttggagaaggagatatcttcatataaaaactgtacagaagcattctgtgaaacttatttgtgatgtgtgcattcaactcacattgttgaacgtatctgttgattgagcagtttagaatctctctttttgtagattctgcaagtgaatatttggaaccctatttcgccctagagtggaaaaggaaatatcttcaaatagaaactacacagaagaattctgcgaaactactttctgatgtttgcatccatctcacagagtagaacctttcttttgattgagcagttttgacacactctttttgtaggatctgcaagtggatatttagagcgacttgaggcctattctgggtagggaaatttcttcaaataaaaactacccagaagcattctgagaaactactttatgatgtgttcattcatctcacagagtagaacctttctttggattgagctgttttgaaacagtctttttttcgaatcagcaagtggatatttggagccttttgagacctatagtggagaaggaaatatcttcacataaaaactatgcagaagcattctgagaaacttctttgtgatctgtgcattcatctcacagtgttgaatcattcttttgatacagaagtttagaagcactctttttttagaatccgcaagtggatatttggagccttttgaggcctatagtggagaaggaaatatcttcacataaaaactatgcagaagcattctgagaaacttctttgtgatgggtgcattcatctcacagagttgaatgtctctgttgattgagcagttttgaaacactctttttgtagaatctgcaagtggatatttggagctcattggggactactgtggaaaaacaaatatcttcacataaaaactacacagaagatttctgaggaacatctttgtgaattgtgcacctaagtcacagtgttgaacctatcttttgattcagcagttggaatctctgtttttacagaatctgagagtggatatttggagcgctttgaggcatactgtggaaaatgaaatgtcttcacacaaaaactacacagaagcattcagagaaccttctttctgatgagtgcattcatcacagagttgaacctttgttttgatttagcagttttgacacaatctttccgtacaatctggaagtgaatatttggagggctttgagatctgttttggaggaggagatatcttcatataaaaactacacagaagcattctgtgaaacttatttgcgatgtgtgcattcaactcacattgttgaaggtatctgttgattgagcagtttagaatctccctttttgtagaatctgcaagtgaatatttggggccctattttgccctatattggaaaaggaaatatcttcaaatagaaactacacagaagcattctgagaaactactttgtgatgcgtgcattcatctcacagggtacaacctttctttggattgagcagttttgaaacactctttttgtagaatctgcaagtggatatttagagtgatttgaggcctactgtggaaagggaaatttcttcaactaaaaactacccagaagcattctgagaaacttctttgtgatctgtgcattcatctcacagagttggatgtttctattgatacagcagttttgaaacactctttttttagaatctgtaaatggatatttggagtcttttcaggcctacagtgtagaaggaaatatcttcacataaaaactatgcagaagcattctgagaaacttctttgtgatgggtgcattcatctcacagagctgaatgtctctgttgattgagcagttttgaaacactctttttgtagaatctgcaagtggatatttggagctcattggggcctactgtggaaaatcaaatatcttcacataaaaactacacagaagcattctgagaaacacctttgtgagttgtgcactgaagtcacgttgttgaacgtatcttttgattcagcagttttgaatctctctttttacagaatctgagagtggatatttggagcgctttgaggagtactgttgaaaatgaaatatcttcacacaaaaactacacagaagcattcagagaaacttctttctgatgagagcattcatcacagagttgaacctttgttttgatttagcagttttgagacaatctttccgtagaatctggaagtaaatatttggagggctttgagttctgttttggagaaggagatatcttcatataaaaactatacagaagcattctgtgaaacttatttgtgatgtgtgcattcaaccaacaatgttgaaagtatctgttgattgagcagattagaatctctctttttgtagaatctgcaagtgaatatttggagccctatttcgccctatagtggaaaattaaatatcttcaaatagaagctacacagaagcattctgacaaactactttgtgatgtgtgcattcatctcacagagtagtacctttctttggattgagcagttttgaaacactctttttttagaatctgcaagtggatatttagagcgatttgaggcctattgtggaaagggaaatttcttcaaataaaaactacccagaagctttatgagaaacttctttgtgatctgtgcatccatctcacagagttgaatctttcttttgatacagcagttttgaaacactatttttttaggatctacaagtggatatttggagccttttgaggcctatagtggagaaggaaatatcttcacataaaaactatgcagaagcattcggcgaaacttctttgtgatgggtgcattcatctcacagagttgaatgtctctgttgattgagcagttttgaaacactctttttatagaatctgcaagtggatatttggagttcattggggcctgctgtggaaaaacaaatatcttcacataaaaactacacagaagcattcttataaacatctttgtgagttgtgcactgaagtcacagtgttgaacctatcttttgattcagcagttttgaatctctctttttacagaatctgggagtggatatttggagcgctttgaggcgtactgtggaaaatgaaatatcttcacacaaaaactgcacagaagcattcagagaaccttctttctgatgagtgcattcatcacagagttgaacctttgttttgatttagcagttttgacacaatctttccgtagaatctggaagtgaatatttggagggctttgagttctcttttggagaaggagatatcttcatataaaaactacacagaagcattctgtgaaacttatttgtgatgtgtgcattcaactcatattgttgaacgtatctgttgattgagcagtttagaaactccctttttgtagaatctgcaagtgaatatttggagccctatttcaccctatagtggaaaaggaaatgtcttcaaatagaaactacacagaagaattctgcgaaactactttctgatgtttgcatccatctcacagagtagaacctttcttttgattgagcagttttgacacactctttttgtaggatctgcaagtggatatttagagcgacttgaggcctattctgggtagggaaatttcttcaaataaaaactacccagaagcattctgagaaactactttatgatgtgttcattcatctcacagagtagaacctttctttggattgagctgttttgaaacagtctttttttcgaatctgcaagtggatatttggagccttttgagacctatagtggagaaggaaatatcttcacataagaactatgcagaagcattctgagaaacttctttgtgatctgtgcattcatctcacagtgttgaatcattcttttgatacagaagtttagaagcactctttttttagaatccgcaagtggatatttggagccttttgaggcctatagtggagaaggaaatatcttcacataaaaactatgcagaagcattctgagaaacttctttgtgatgggtgcattcatctcacagagttgaatgtctctgttgattgagcagttttgaaacactctttttgtagaatctgcaagtggatatttggagctcattggggactactgtggaaaaacaaatatcttcacataaaaactacacagaagatttctgaggaacatctttgtgaattgtgcacctaagtcacagtgttgaacctatcttttgattcagcagtttggaatctctctttttacagaatctgagagtggatatttggagcgctttgaggcatactgtggaaaatgaaatgtcttcacacaaaaactacacagaagcattcagagaaccttctttctgatgagtgcattcatcacagagttgaacctttgttttgatttagcagttttgacacaatccttccgtagaatctggaagtgaatatttggagggctttgagttctcttttggagaaggagatatcttcatataaaaactacacagaagcattctgtgaaacttatttgcgatgtgtgcattcaactcacattgttgaaggtatctgttgattgagtagtttagaatctctctttttgtagaatctgcaagtgaatatttggggccctattttgccctatattggaaaaggaaatatcttcaaatagaaactacacagaagcattctgagcaaactactttgtgatgtgtgcattcatctcacagggtacaacctttctttggattgagcagttttgaaacactctttttgtagaatctgcaagtggatatttagagtgatttgaggcctattgtggaaagggaaatttcttcaaataaaaactacccagaagcattctgagaaacttctttgtgatctgtgcattcatctcacagagttggatgtttctattgatacagcagttttgaaacactctttttttagaatctgtaaatggatatttggagtcttttcaggcctacagtgtagaaggaaatatcttcacataaaaactatgcagaagcattcggcaaaacttctttgtgatgtgtgcattcatctcacagagttgaatgtctctgttgattgagtagttttgaaacactctttttgtagaatctgcaagcagatatttggagctcattggggcctactgtggaaaacaaataacttctcataaaaactacacagaagcattctgagaaacatctttgtgaggtgtgcactgaagtcacagtgttgaacctatcttttgattcagcagttttgaatctctctttttgcagaatctgcgagtggatatttggagcactttgaggcgaactgtggaaaatcaaatatcttcacataaaaactacacagaagcattcagagaaacttctttctgatgagagcattcatcgcagagttgaacctttgttttgatttagcagttttgagacaatctttccgtagaatctggaagtaaatatttggagggctttgagttctgttttggagaaggagatatcttcatataaaaactatacagaagcattctgtgaaacttatttgtgatgtgtgcattcaaccaacaatgttgaaagtatctgttgattgagcagattagaatctctctttttgtagaatctgcaagtgaatatttggagccctatttcgccctatagtggaaaaggaaatatcttcaaatagaagctacacagaagcattctgacaaactactttgtgatgtgtgcattcatctcacagagtagtacctttctttggattgagcagttttgaaacactctttttttagaatctgcaagtggatatttagagcgatttgaggcctattgtggaaagggaaatttcttcaactaaaaactacccagaagctttatgagaaacttctttgtgatctgtgcatccatctcacagagttgaatctttcttttgatacagcagttttgaaacactatttttttaggatctacaagtggatatttggagccttttgaggcctatagtggagaaggaaatatcttcacataaaaactatgcagaagcattctgagaaacttctttgtgatgtgtgcattcatctcacagagttgaatgtctctgttgattgagcagttttgaaacactctttttatagaatctgcaagtggatatttggagttcattggggcctgctgtggaaaaacaaatatcttcacataaaaactacacagannnnnnnnnnnnnnnnnnnnnnnnnnnnnnnnnnnnnnnnnnnnnnnnnnnnnnnnnnnnnnnnnnnnnnnnnnnnnnnnnnnnnnnnnnnnnnnnnnnnaggctgggcgcggtggctcacgcctgtaatcccagcactttgggaggccgaggcgggcggatcacgaggtcaggagatcgagaccatcctggctaacacggtgaaaccctgtctctactaaaaaaaaatacaaaaaattagccgggccgtggtagcgggcgcctgtagtcccagctactcgggagggtgaggcaggagaatggcgtgagcccgggaggcggagcttgcagtgagccgagatcgcgcctctgcactccagcctgggcgagagagcaagactccgctaaaaaaaaaaaaagcattcagagaaccttctttctgatgagtgcattcatcacagagttgaacctttgttttgatttagcagttttgacacaatctttccgtacaatctggaagtgaatatttggagggctttgagttctgttttggagaaggagatatcttcatataaaaactacacagaagcattctgtgaaacttatttgtgatgtgtgctttcaactcaagttgttgaacgtatctgttgattgagcagtttagaatctctcttttcgtagaatctgcaagtgaatatttggagccctatttcgccctagagtggaaaaggaaatatcttcaaatagaaactacacagaagcattctgagaaactacttagtgatgtgtgcattcatctcacagagtagaacctttcttttgattgagcagttttgaaacactctttttgtagaatctgaaagtggatatttagagcaatttgaggcttattgtggaaagagaaatatcttcaaataaaaactacccagaagcattctgagaaactactttgtgatgtgtgcattcatctcacagagtagaacctttctttggattgagcagttttgaaacactctttttttagaatctgcaagtggatatttggagccttttgaggcctatggtggagaaggaaatatcttcacataaaaactatgcagaagcatcctgagaaacttctttgtgatctgtgcattcatctaacagagttgaatctttcttttgacacagcagttttgaaacactcttttttcagaatctgcaagtggatatttggagccttttgaggcctatagtggagaaggaaatatcttcacataaaaactatgcagaagcattctgagaaacttctttgtgaggtgtgcactgaagtcacagtgttgaacctatcttttgattcagcagttttgaatctctctttttacagaatctgcgagtggatatttgtagctcattggggcctactgtggaaaaacaaatatcttcacataaaaactacacagatatattctgagaaacttctttgtgatgtgtgcattcttctcacagagttctacctttattttgactgagcagttttgagactctttccatagaatctggaagtgaatatttggagggctttgagatctattttggagaaggagatatcttcatatcaaaactacaaagaaacattttgagaaacttctctgtgatgtgtgcattcatatcacagggttgaaactaccttttgattgaacagttttgaatctctctttttgtaccatctgcaagtgcatatttagagccctttgaggcctatggtggaaaatgaactatcctcaaataaaaactacacagcagcattctgagaaagtactttgtgatgtgtgcattcatctcatacagtagaacctttctttggattgagcagttttgaaacactctttttttagaatctgcaagtggatatttagagcgttttgaggcctattgtggaaagggaaatttcttcacataaaaactacccagaagcattctgagaaacttctttgcgatctgtgcattcatctcacagagttgaatctttgttttgatacagcagttttgaaacactctttttttagaatccgcaagtggatatttggagccttttgaggcctatagtggagaaggaaatatcttcacataaaaactacgcagaagcattctgagaaacttctttgtgatgggtgcattcatctcacagagttgaatgtctctgttgattgagcagttttgaaacactctttttgtagaatctgcaagtggatatttggagctcattggggcctactgtggaaaaacaaatatcttcacataaaaactacacagaagatttctgagaaacacctttgtgagttgtgcactgaagtcacagtgttgaacctatcttttgattcagcagttttgaatctctctttttacagaacctgcgagtggatatttggagcgctttgaggcgtactgtggaaaatgaaatatcttcacacaaaaactacacagaagcattcagagaaccttctttctgatgagtgcattcatcacagagttgaacctttgttttgatttagcagttttgacacaatctttccgtacaatctggaagtgaatatttggagggctttgagttctgttttggagaaggagatatcttcatataaaaactacacagaagcattctgtgaaacttatttgtgatgtgtgctttcaactcaagttgttgaacgtatctgttgattgagcagtttaggatctctcttttcgtagaatctgcaagtgaatatttggagccctatttcgccctagagtggaaaaggaaatatcttcaaatagaaactacacagaagcattctgagaaaccactttgtgatgcgtgcattcacctcacagagtagaacctttcttttgattgagcagttttgaaacactctttttgtagaatctgcaaatggatatttagagcgatttgaggcctattgtggaaagggaaatttcttcaaataaaaactacccagaagcattctgagaaactactttgtgatgtgtgcattcatctcacagagtagaacctttctttggattgagcagttttgaaacactctttttttagaatctgcaagtggatatttggagccttttgaggcctatggtggagaaggaaatatcttcacataaaaactatgcagaagcatcctgagaaacttctttgtgatctgtgcattcatctaacagagttgaatctttcttttgacacagcagttttgaaacactcttttttcagaatctgcaagtggatatttggagccttttgaggcctatagtggagaaggaaatatcttcacataaaaactatgcagaagcattctgagaaacttctttgtgatgtgtgcattcatctcacagagttgaatgtctctgttgattgagcagttttgaaacactctttttatagaatctgcaagtggatattcggagttcattggggcctgctgtggaaaaacaaatatcttcacataaaaactacacagaagatttctgagaaacacttttgtgaggtgtgcactgaagtcagagtgttgaacctatcttttgattcagcagttttgaatctctctttttacagaacctgcgagtggatatttggagcgctttggggcttactgtggaaaatgaaatatcttcacacaaaaacttcacagaagcattcagagaaccttctttctgatgagtgcattcatcacagagttgaacctttgttttgatttagtagttttgagacaatcattccgtagaatctggaagtgaatatttgtagggatttgagttgtgttttggagaaggagatatcttcatataaaaattgtacagaagcattctgtgaaacttatttgtgatgtgtgcattcaactcacattgttgaacgtatctgttgattgagcagtttagaatctctctttttgtagattctgcaagtgaatatttggagccctacttcgccctagagtggaaaaggaaatatcttcaaatagaaactacacagaagaattctgtgaaactactttctgatgtttgcatccatctcacagagtagaacctttcttttgattgagcagttttgacacactctttttgtaggatctgcaagtggatatttagagcgacttgaggcctattctgggtagggaaatttcttcaaataaaaactacccagaagcattctgagaaactactttatgatgtgttcattcatctcacagagtagaacctttctttggattgagctgttttgaaacagtctttttttcgaatctgcaagtggatatttggagccttttgagacctatagtggagaaggaaatatcttcacataaaaactatggagaagcattctgagaaacttctttgtgatctgtgcattcatctcacagtgttgaatcattcttttgatacagaagtttagaagcactctttttttagaatccgcaagtggatatttggagccttttgaggcctatagtggagaaggaaatatcttcacataaaaactatgcagaagcattctgagaaacttctttgtgatgggtgcattcatctcacagagttgaatgtctctgttgattgagcagttttgaaacactctttttgtagaatctgcaagtggatatttggagctcattggggactactgtggaaaaacaaatatcttcacataaaaactacacagaagcattctgagaaacttctttgtgatctgtgcattcatctcacagagttggatgtttctattgatacagcagttttgaaacactctttttttagaatctgtaaaaggatatttggagtcatttcaggcctacagtgtagaaggaaatatcttcacataaaaactacacagaagcattcggcaaaacttgtttgtgatgtgtgcattcatctcacagagttgaatgtctctgttgattgagcagttttgaaacactctttttgtagaatctgcaagtggatatttggagctcattggggcctactgtggaaaaacagataacttctcataaaaactacacagaagcattctgagaaacacctttgtgagttgtgcactgaagtcacgttgttgaacgtatcttttgattcagcagttttgaatctctctttttacagaatctgagagtggatatttggagggctttgaggcgtactgttgaaaatgaaatatcttcacacaaaaactacacagaagcattcagagaaacttctttctgatgagagcattcatcacagagttgaacctttgttttgatttagcagttttgagacaatctttccgtagaatctggaagtaaatatttggagggctttgagttctgttttggagaaggagatatcttcatataaaaactatacagaagcattctgtgaaacttatttgcgatgtgtgcattcaactcacattgttgaaggtatctgttgattgagcagtttagaatctccctttttgtagtatctgcaagtgaatatttggggccctattttgccctatattggaaaaggaaatatcttcaaatagaagctacacagaagcattctgagaaactactttgtgatgcgtgcattcatctcacagggtacaacctttctttggattgagcagttttgaaacactctttttgtagaatctgcaagtggatatttagagtgatttgaggcctactgtggaaagggaaatttcttcaactaaaaactacccagaagcattctgagaaacttctttgtgatctgtgcattcatctcacagagttggatgtttctattgatatagcagttttgaaacactctttttttagaatctgtaaatggatatttggagccttttcaggcctacagtgtagaaggaaatatcttcacataaaaactatgcagaagcattcggcaaaacttatttgtgatgtgtgcattcatctcacagagttgaatgtctctgttgattgagtagttttgaaacactctttttgtagaatctgcaagtagatatttggagctcattggggcctactgtggaaaaacaaataacttctcataaaaactacacagaagcattctgagaaacatctttatgaggtgtgcactgaagtcacagtgttgaacctatcttttgattcagcagttttgaatctctctttttgcagaatctgcgagtggatatttggagcactttgaggcgaactgtggaaaatcaaatatcttcacataaaaactacacagaagcattcagagaaccttctttctgatgagcgcattcatcacagagttgaacctttgttttgatttagcagttttgaggcaatctttctgtagaatctggaagtaaatatttggagggctttgagttctgttttggagaaggagatatcttcatatacaaactacacagaagcattctgtgaaacttatttgtgatgtgtgcattcaaccaacaatgttgaaagtatctgttgattgagcagattagaatctctctttttgtagaatctgcaagtgaatatttggagccctatttcgccctatagtggaaaaggaaatatcttcaaatagaagctacacagaagcattctgagaaactactttgtcatgtgtgtattcatctcacagagtagaacctttcttttgattgagcagttttgaaacactctttttgtagaatctgcaagtggatatttagagcgatttgcggcctattgtggaaagggaaatatcttcaaataaaaactacccagaagcattctgagaaacttctttgtgatctgtgcattcatcgcacagagttgaatctttcttttgatacagcagttttgaaacactacttttttggaatctgcaagtggatatttggagccttttgaggcctatagtggagaaggaaatatcttcacataaaaactacgcagaagcattctgagaaacttctttgtgatgtgtgcattcatctcacagaactgaatgtctctgttgattgagcagttttgaaacactctttttgaagaatctgcaagtggatatttggagctcattggggcctactgtggaaaaacaaatatcttcacataagaactacacagaagatttctgaggaacatctttttgaattgtgcacctaagtcacagtgttgaacctatcttttgattcagcagtttggaatctctctttttacagaatctgagagtggatatttggagcgctttgaggcatactgtggaaaatgaaatgtcttcacacaaaaactacacagaagcattcagagaaccttctttctgatgagtgcattcatcacagagttgaacctttgttttgatttagcagttttgacacactatttccgtacaatctggaagtgaatatttggagggctttgagatctgttttggaggaggagatatcttcatataaaaactacacagaagcattctgtgaaacttatttgcgatgtgtgcattcaactcacattgttgaaggtatctgttgattgagcagtttagaatctccctttttgtagaatctgcaagtgaatatttggggccctattttgccctatattggaaaaggaaatatcttcaaatagaaactacacagaagcattctgagaaactactttgtgatgcgtgcattcatctcacagggtacaacctttctttggattgagcagttttgaaacactctttttgtagaatctgcaagtggatatttagagtgatttgaggcctactgtggaaagggaaatttcttcaactaaaaactacccagaagcattctgagaaacttctttgtgatctgtgcattcatctcacagagttggatgtttctattgatacagcagttttgaaacactctttttttagaatctgtaaatggatatttggagtcttttcaggcctacagtgtagaaggaaatatcttcacataaaaactatgcagaagcattcggcaaaacttctttgtgatgtgtgcattcatctcacagagttgaatgtctctgttgattgagcagttttgaaacactctttttgtagaatctgcaagtggatatttggagctcattggggcctactgtggaaaaacaaataacttctcataaaaactacacagaagcattctgtcaaccttatttgtgatgtgtgcattcagctcacattgttgaacgtatcttttgattcagcagttttgaatctttctttttacagaatctgcgagtggatatttggagcgctttgaggcctactgtggaaaatgaattatcttcacacaaaaactacacagaagcattctgagaaactactttgtgaagtgtgcattcacctcacagagtacaacctttcttttgactgagcagttttgaaacattctttctgtagaatctgcaagtggatatttagagcaatttgaggcctattgtggaaagggaaatttcttcaaataaaaactacccagaagctttatgagaaacttctttgtgatctgtgcatccatctcacagagttgaatctttcttttgatacagcagttttgtaacactatttttttagaatctacaagtggatatttggaacctttgaggcctatagtggggaaggaaatatcttcacataaaaactatgcagaagtattctgagaaacttctttgtgatgtgtgcattcatctcacagagttgaatgtctctgttgattgagcagttttgaaacactctttttatagaatctgcaagtggatatttggagttcattggggcctgctgtggaaaaacaaatatcttcacataaaaactacacagaagatttctgataaacacctttgtgagttgtgcactgaagtcacagtgttgaacctatcttttgattcaccagttttgaatctctctttttacagaacctgcgagtagatatttggagcgctttgaggcgtactgtggaaaatgaaatatcttcacacaaaaactgcacagaagcattcagagaaccttctttctgatgagtgcattcatcacagagttgaacctttgttttgatttagtagttttgagacaatcattccgtagaatctggaagtgaatatttgtagggatttgagttgtgttttggagaaggagatatcttcatataaaaactgtacagaagcattctgtgaaacttatttgtgatgtgtgcattcaactcacattgttaaacgtatctgttgattgagcagtttagaatctctctttttgtagattctgcaagtgaatatttggagccctatttcgccctagagtggaaaaggaaatatcttcaaatagaaaccacacagaagaattctgcgaaactactttctgatgtttgcatccatctcacagtgtagaacctttcttttgattgagcagttttgacacactctttttgcaggatctgcaagtggatatttagagcgacttgaggcctattctgggtaaggaaatttcttcaaataaaaactacccagaaacattctgagaaactactttatgatgtgttcattcatctcacagagtagaacctttctttggattgagctgttttgaaacagtctttttttcgaatctgcaagtggatatttggagccttttgagacctatagtggagaaggaaatatcttcacataaaaactatgcagaagcattctgagaaacttctttgtgatctgtgcattcatctcacagtgttgaatcattcttttgatacagaagtttagaagcactctttttttagaatccgcaagtggatatttggagccttttgaggcctatagtggagaaggaaatatcttcacataaaaactatgcagaagcattctgagaaacttctttgtgatgggtgcattcatctcacagagttgaatgtctctgttgattgagcagttttgaaacactctttttgtagaatctgcaagtggatatttggagctcattggggactactgtggaaaaacaaatatcttcacataaaaactacacagaagatttctgaggaacatctttgtgaattgtgcacctaagtcacagtgttgaacctatcttttgattcagcagtttggaatctctctttttacagaatctgagagtggatatttggagcgctttgaggcatactgtggaaaatgaaatgtcttcacacaaaaactacacagaagcattcagagaaccttctttctgatgagtgcattcatcacagagttgaacctttgttttgatttagccgttttgacacaatctttccgtacaatctggaagtgaatatttggagggctttgagatctgttttggaggaggagatatcttcatataaaaactacacagaagcattctgtgaaacttatttgcgatgtgtgcattcaactcacattgttgaaggtatctgttgattgagtagtttagaatctctctttttgtagaatctgcaagtgaatatttggggccctattttgccctatattggaaaaggaaatatcttcaaatagaaactacacagaagcattctgagaaactactctgtgatgcgtgcattcatctcacagggtacaacctttctttggattgagcagttttgaaacactctttttgtagaatctgcaagtggatatttagagtgatttgaggcctactgtggaaagggaaatttcttcaactaaaaactacccagaagcattctgagaaacttctttgtgatctgtgcattcatctcacagagttggatgtttctattgatacagcagttttgaaacactctttttttagaatctgtaaacggatatttggagtcttttcaggcctacagtgtagaaggaaatatcttcacataaaaactatgcagaagcattcggcaaaacttatttgtgatgtgtgcattcatctcacagagttgaatgtctctgttgattgagtagttttgaaacactctttttgtagaatctgcaagtagatatttggagctcattggggcctactgtggaaaaacaaataacttctcataaaaactacacagaagcattctgagaaacacctttgtgagttgtgcactgaagtcacgttgttgaacgtatcttttgattcagcagttttgaatctctctttttacagaatctgagagtggatatttggagcgctttgaggcgtactgttgaaaatgaaataccttcacacaaaaactacacagaagcattcagagaaacttctttctgatgagagcattcatcacagagttgaacctttgttttgatttagcagttttgagacaatctttccgtagaatctggaagtaaatatttggagggctttgagttctgttttggagaaggagatatcttcatataaaaactatacagaagcattctgtgaaacttatttgtgatgtgtgcattcaaccaacaatgttgaaagtatctgttgattgagcagattagaatctctctttttgtagaatctgcaagtgaatatttggagccctatttcgccctatagtggaaaaggaaatatcttcaaatagaagctacacagaaggattctgtgaaactactttgtgatgtgtgcattcatcttacagagttgaacctttctttggattgagcagttttcaaacactctttttgtagaaactgtatggggatatttagagcgatttgaggcctattgtggaaagggtaatttcttcaaattaaaactacccagaagcattctgagaaacttctttgtgatctgtgcatttatctcacagagttgaatctttcttttggtacagcagatttaaaacactctttttttagaatctgcaagtggatatttggaaccttttgaggcctatggtggagaaggaaatatcttcacataaaaactatgcagaagcattctgagaaacttctttgtgatgtgtgcattcatctcacagagttgaatgtctctgttgattgagcagttttgaaacactctttttgtagaatctgcaagtggatattgggagctcattggggcctactgtggaaacacaaatatcttcacataaaaactacacagaagatttctgaggaacatctttgtgaattgtgcacctaagtcacagtgttgaacctatcttttgattcagcagtttggaatctctctttttacagaatctgagagtggatatttggagcgctttgaggcatactgtggaaaatgaaatgtcttcacactaaaactacacagaagcattcagagaaccttctttctgatgagtgcattcatcacagagttgaacctttgttttgatttagcagttttgacacaatctttccgtacaatctggaagtgaatatttggagggctttgagttctgttttggagaaggagatatcttcatataaaaactacacagaagcattctgcgaaacttatttgtgatgtgtgcattcaactcacagtgttgaacctatctgttgattgagcagtttagaatctctctttttgtagaatctgcaagtgaatatttggagccctatttcaccctatagtggaaaaggaaatatcttcaaatagaaactacacagaagcattctgagaaaccactttgtgatgcgtgcattcacctcacagagtagaacctttcttttgattgagcagttttgaaacactctttttgtagaatctgcaaatggatatttagagcgatttgaggcctattgtggaaagggaaatttcttcaaataaaaactacccagaagcattctgagaaactactttgtgatgtgtgcattcatctcacagagtagaacctttctttggattgagcagttttgaaacactctttttttagaatctgcaagtggatatttggagccttttgaggcctatggtggagaaggaaatatcttcacataaaaactatgcagaagcaacctgagaaacttctttgtgatctgtgcattcatctaacagagttgaatctttcttttgacacagcagttttgaaacactcttttttcagaatctgcaagtggatatttggagccttttgaggcctatagtggagaaggaaatatcttcacataaaaactatgcagaagcattctgagaaacttctttgtgaggtgtgcactgaagtcacagtgttgaacctatcttttgattcagcagttttgaatctctctttttacagaatctgcgagtggatatttgtagctcattggggcctactgtggaaaaacaaatatcttcacataaaaactacacagaagcattcagagaaacttctttctgatgagagcattcatcacagagttgaacctttgttttgatttagcagttttgagacaatctttccgtagaatctggaagtaaatatttggagggctttgagttctgttttggagaaggagatatcttcatataaaaactatacagaagcattctgtgaaacttatttgtgatgtgtgcattcaaccaaaaatgttgaaagtatctgttgattgagcagattagaatctctctttttgtagaatctgcaagtgaatatttggagccctatttcgccctatagtggaaaaggaaatatcttcaaatagaagctacacagaagcattctgacaaactactttgtgatgtgtgcattcatctcacagagtagtacctttctttggattgagcagttttgaaacactctttttttagaatctgcaagtggatatttagagcgatttgaggcctattgtggaaagggaaatttcttcaactaaaaactacccagaagctttatgagaaacttctttgtgatctgtgcatccatctcacagagttgaatctttcttttgatacagcagttttgaaacactatttttttaggatctacaagtggatatttggagccttttgaggcctatagtggagaaggaaatatcttcacataaaaactatgcagaagcattctgagaaacttctttgtgatgtgtgcattcatctcacagagttgaatgtctctgttgattgagcagttttgaaacactctttttatagaatctgcaagtggatatttggagttcattggggcctgctgtggaaaaacaaatatcttcacatagaaactacacagaagatttctgataaacaactttgtgagttgtgcactgaagttacagtgttgaacctatcttttgattcaccagttttgaatctctctttttacagaacctgcgagtggatatttggagcgctttgaggcgtagtgtggaaaatgcaatatcttcacacaaaaactgcacagaagcattcagagaaccttctttctgatgagtgcattcatcacagagttgaacctttgttttgatttagtagttttgagacaatcattccgtagaatctggaagtgaatatttgtagggatttgagttgtgttttggagaaggagatatcttcatataaaaactgtacagaagcattctgtgaaacttatttgtgatgtgtgcattcaactcacattgttgaacgtatctgttgattgagcagtttagaatctctctttttgtagattctgcaagtgaatatttggagccctatttcaccctagagtggaaaaggaaatatcttcaaatagaaactacacagaagaattctgcgaaactactttctgatgtttgcatccatctcacagagtagaacctttcttttgattgagcagttttgacacactctttttgtaggatctgcaagtggatatttagagcgacttgaggcctattctgggtagggaaatttcttcaaataaaaactacccagaagcattctgagaaactactttgtgatgtgtgcattcatctcacagagtagaacctttctttggattgagcagttttgaaacactctttttttagaatctgcaagtggatatttggagccttttgaggcctatggtggagaaggaaatatcttcacataaaaactatgcagaagcattctgagaaacttctttgtgatctgtgcattcatctcacagtgttgaatttttctttgatacagcagttttgaaagactatttttttagaatctgcaagtggatatttggagccttttgaggcctatagtggagaaggaaatatcttcacttaaaaactatgcagaagaattctgagaaacttctttgtgatgggtgcattcatctcacagagttgaatgtctctggtgattgagcagttttgaaacactctttttgtagaatctgcaagtggatatttggatctcattggggactactgtggaaaaacaaatatcttcacataaaaactacacagaagatttctgaggaacatctttgtgaattgtgcacctaagtcacagtgttgaacctatcttttgattcagcagtttggaatctctctttttacagaatctgagagtggatatttggagcgctttgaggcatactgtggaaaatgaaatgtcttcacacaaaaactacacagaagcattcagagaaccttctttctgatgagtgcattcatcacagagttgaacctttgttttgatttagcagttttgacacaatctttccgtacaatctggaagtgaatatttggagggctttgagatctgttttggaggaggagatatcttcatataaaaactacacagaagcattctgtgaaacttatttgcgatgtgtgcattcaactcacattgttgaaggtatctgttgattgagcagtttagaatctccctttttgtagaatctgcaagtgaatatttggggccctattttgccctatattggaaaaggaaatatcttcaaatagaaactacacagaagcattctgagaaactactctgtgatgcgtgcattcatctcacagggtacaacctttctttggattgagcagttttgaaacactctttttgtagaatctgcaagtggatatttagagtgatttgaggcctattgtgtaaagggaaatttcttcaactaaaaactacccagaagcattctgagaaacttctttgtgatctgtgcattcatctcacagagttggatgtttctattgatacagcagttttgaaacactctttttttagaatctgtaaatggatatttggagtcttttcaggcctacagtgtagaaggaaatatcttcacataaaaactatgcagaagcattcggcaaaacttgtttgtgatgtgtgcattcatctcacagagttgaatgtctctgttgattgagcagttttgaaacactctttttgtagaatctgcaagtggatatttggagctcattggggcctactgtggaaaaacagataacttctcataaaaactacacagaagcattctgagaaacatctttgtgagttgtgcactgaagtgacagtgttgaacctatcttttgattcagcagttttgagtctctctttttacagaatctgagagtggatatttggagcgctttgaggcgcactgtggaaaatgaaatatcttcacacaaaaactacacagaagcattctgagaaacatctttgtgaggtgtgcactgaagtcacattgttgaacctatgttttgattcagcagttttgaatctctctttttgcagaatctgcgagtggatatttggagcactttgaggcgtactgtggaaaatcaaatatcttcacataaaaactacacagaagcattcagagaaacttctttctgatgagagcattcatcacagagttgaacctttgttttgatttagcagttttgagacaatctttccgtagaatctggaagtaaatatttggagggctttgagttctgttttggagaaggagatatcttcatataaaaactatacagaagcattctgtgaaacttatttgtgatgtgtgtattcaaccaacaatgttgaaagtatctgttgattgagcagattagaatctctctttttgtagaatctgcaagtgaatatttggagccctatttcgccctatagtggaaaaggaaatatcttcaaatagaagctacacagaagcattctgagcaaactactttgtgatgtgtgcattcacctcacaggagtacaacctttcttttgactgagcagttttgaaacattctttctgtagaatctgcaagtggatatttagagcaatttgaggcctattgtggaaagggaaatttcttcaaataaaaactacccagaagctttatgagaaacttctttgtgatctgtgcatccatctcacagagttgaatctttcttttgatacagcagttttgtaacactatttttttagaatctacaagtggatatttggagcctttgaggcctatagtggggaaggaaatatcttcacataaaaactatgcagaagcattcggcgaaacttctttgtgatgggtgcattcatctcacagagttgaatgtctctgttgattgagcagttttgaaacactctttttatagaatctgcaagtggatatttggagttcattggggcctgctgtggaaaaacaaatatcttcacataaaaactacacagaagatttctgataaacaactttgtgagttgtgcactgaagtcacagtgttgaacctatcttttgattcaccagttttgaatctctctttttacagaacctgcgagtggatatttggagcgctttgaggcgtactgtggaaaatgcaatatcttcacacaaaaactgcacagaagcattcagagaaccttctttctgatgagtgcattcatcacagagttgaacctttgttttgatttagtagttttgagacaatcattccgtagaatctggaagtgaatatttgtagggatttgagttgtgttttggagaaggagatatcttcatataaaaactgtacagaagcattctgtgaaacttatttgtgatgtgtgcattcaactcacattgttgaacgtatctgttgattgagcagtttagaatctctctttttgtagattctgcaagtgaatatttggagccctatttcgccctagagtggaaaaggaaatatcttcaaatagaaactacacagaagaattctgcgaaactactttctgatgtttgcatccatctcacagagtagaacctttcttttgattgagcagttttgacacactctttttgtaggatctgcaagtgggtatttagagcgacttgaggcctattctgggtagggaaatttcttcaaataaaaactacccagaagcattctgagaaactactttatgatgtgttcattcatctcacagagtagaacctttctttggattgagctgttttgaaacagtctttttttcgaatctgcaagtggatatttggagccttttgagacctatagtggagaaggaaatatcttcacataagaactatgcagaagcattctgagaaacttctttgtgatctgtgcattcatctcacagtgttgaatcattcttttgatacagaagtttagaagcactctttttttagaatccgcaagtggatatttggagccttttgaggcctatagtggagaaggaaatatcttcacataaaaactatgcagaagcattctgagaaacttctttgtgatgggtgcattcatctcacagagttgaatgtctctgttgattgagcagttttgaaacactctttttgtagaatctgcaagtggatatttggagctcattggggactactgtggaaaaagaaatatcttcacataaaaactacacagaagatttctgaggaacatctttgtgaattgtgcacctaagtcacagtgttgaacctatcttttgattcagcagtttggaatctctctttttacagaatctgagagtggatatttggagcgctttgaggcatactgtggaaaatgaaatgtcttcacacaaaaactacacagaagcattcagtagaaccttctttctgatgagtgcattcaccacagagttgaacctttgttttgatttagccgttttgacacaatctttccgtacaatctggaagtgaatatttggagggctttgagatctgttttggaggaggagatatcttcatataaaaactacacagaagcattctgtgaaacttatttgcgatgtgtgcattcaactcacattgttgaaggtatctgttgattgagcagtttagaatctccctttttgtagtatctgcaagtgaatatttggggccctattttgccctatattggaaaaggaaatatcttcaaatagaagctacacagaagcattctgagaaactactttgtgatgcgtgcattcatctcacagcgtacaacctttctttggattgagcagttttgaaacactctttttgtagaatctgcaagtggatatttagagtgatttgaggcctattgtggaaagggaaatttcttcaactaaaaactacccagaagcattctgagaaacttctttgtgatctgtgcattcatctcacagagttggatgtttctattgatacagcagttttgaaacactctttttttagaatctgtaaatggatatttggagtcttttcaggcctacagtgtagaaggaaatatcttcacataaaaactatgcagaagcattcggcaaaacttatttgtgatgtgtgcattcatctcacagagttgaatgtctctgttgattgagtagttttgaaacactctttttgtagaatctgcaagtagatatttggagctcattggggcctactgtggaaaaacaaataacttctcataaaaactacacagaagcattctgagaaacacctttgtgagttgtgcactgaagtcacgttgttgaacgtatcttttgattcagcagttttgaatctctctttttacagaatctgagagtggatatttggagcgctttgaggagtactgttgaaaatgaaatatcttcacacaaaaactacacagaagcattcagagaaacttctttctgatgagagcattcatcacagagttgaacctttgttttgatttagcagttttgagacaatctttccgtagaatctggaagtaaatatttggagggctttgagttctgttttggagaaggagatatcttcatataaaaactatacagaagcattctgtgaaacttatttgtgatgtgtgcattcaaccaacaatgttgaaagtatctgttgattgagcagattagaatctctctttttgtagaatctgcaagtgaatatttggagccctatttcgccctatagtggaaaaggaaatatcttcaaatagaagctacacagaagcattctcagaaactactttgtgatgcgtgcattcatcccacagagtagaacctttctttggattgagcagttttgaagaactctttttgtagaatctgcaagtggatatttagagggacttgaggcctattgtggaaagggaaatttcttcaaataaaaacttcccagaagcattctgataaactcctttgtgatctgtgcattcatcacacagagttgaatcttccttttgatacagcagttttgaaacactctttttttagtatctgcaggtggatatttggggcattttcaggcctatagtggagaaggaaacatcttcacataaaaagtatgcagaagcatcctgagaaacttctttgtgatgtgtgcattcatctcacagagttgaatgtctctgttgattgagcagttttgaaacactctttttgtagaatctgcaagtagatatttggagttcattggggcctactgtggaaacacaaatatcttcacataaaaactacacagaagatttctgataaacacctttgtgaggtgtgcactgaagtcacagtgttgaacctatcttttgattcaccagttttgaatctctctttttacagaacctgcgagtggatatttggagcgctttgaggcgtactgtggaaaatgcaatatcttcacacaaaaactgcacagaagcattcagagaaccttctttgtgatgagtgcattcatcacagagttgaacctttgttttgatttagtagttttgagacaatcattccgtagaatctggaagtgaatatttgtagggatttgagttgtgttttggagaaggagatatcttaatataaaaactgtacagaagcattctgcgaaacttatttgtgatgtgtgcattcaactcacagtgttgaacctatctgttgattgagcagtttagaatctctctttttgtagaatctgcaagtgaatatttggagccctatttcgccctatagtggaaaaggaaatatcttcaaatagaaactacacagaagcattctgagaaactactttgtgatgtgtgtattcatctcaccgagtagaacctttcttttgattgagcagttttgaaacactctttttgtagaatctgcaagtggatatttagagtgatttgcggcctattgtggaaagggaaatatcttcaaataaaaactacccagaagcattctgagaaactactttgtgatgtgtgcattcatctcacagagtagaacctttctttggattgagcagttttgaaacactctttttttagaatctgcaagtggatatttggagccttttgaggcctatggtggagaaggaaatatcttcacataaaaactatgcagaagcattctgagaaacttctttgtgatctgtgcattcatctcacagtgttgaatcattcttttgatacagaagtttagaagcactctttttttagaatccgcaagtggatatttggagccttttgaggcctatagtggagaaggaaatatcttcacataaaaactatgcagaagcattctgagaaacttctttgtgatgggtgcattcatctcacagggttgaatgtctctgttgattgagcagttttgaaacactctttttgtggaatctgcaagtggatatttggagctcattggggcctactgtggaaaaacaaatatcttcacataaaaactacacagaagatttctgaggaacatctttgtgaattgtgcacctaagtcacagtgttgaacctatcttttgattcagcagtttggaatctctctttttacagaatctgagagtggatatttggagtgctttgaggcatactgtggaaaatgaaatgtcttcacacaaaaactacacagaagcattcagagaaccttctttctgatgagtgcattcatcacagagttgaacctttgttttgatttagccgttttgacacaatctttccgtacaatctggaagtgaatatttggagggctttgagatctgttttggaggaggagatatcttcatataaaaactacacagaagcattctgtgaaacttatttgcgatgtgtgcattcaactcacattgttgaaggtatctgttgattgagcagtttagaatctccctttttgtagaatctgcaagtgaatatttggggccctattttgccctatattggaaaaggaaatatcttcaaatagaaactacacagaagcattctgagaaactactctgtgatgcgtgcattcatctcacagggtataacctttctttggattgagcagttttgaaacactctttttgtagaatctgcaagtggatatttagagtgatttgaggattattgtggaaagggaaatttcttcaactaaaaactacccagaagcattctgagaaacttctttgtgatctgtgcattcatctcacagagttggatgtttctattgatacagcagttttgaaacactctttttttagaatctgtaaatggatatttggagtcttttcaggcctacagtgtagaaggaaatatcttcacataaaaactatgcagaagcattctgagaaacttctttgtgatgggtgcattcatctcacagagttgaatgtctctgttgattgagcagttttgaaacactctttttgtagaatctgcaagtggatatttggagctcattgaggactactgtggaaaaacaaatatcttcacataaaaactacacagaaagcattctgagaaacatctttgtgagttgtgcacctgaagtgacagtgttgaacctatcttttgattcagcagttttgaatctctctttttacagaatctgagagtggatatttggagcgctttgaggcgtactgtggaaaatgaaatatcttcacacaaaaactacacagaagcattcagagaaacttctttctgatgagagcattcatcgcagagttgaacctttgttttgatttagcagttttgagacaatctttccgtagaatctggaagtaaatatttggagggctttgagttctgttttggagaaggagatatcttcatataaaaactatacagaagcattctgtgaaacttatttgtgatgtgtgcattcaaccaacaatgttgaaagtatctgttgattgagcagattagaatctctctttttgtagaatctgcaagtgaatatttggagccctatttcgccctatagtggaaaaggaaatattttcaaatagaagctacacagaagcattctgagaaagtactttgtgatgtgtgcattcatctcatacagtagaacctttctttggattgagcagttttgaaacactctttttttagaatctgcaagtggatatttagagcgttttgaggcctattgtggaaagggaaatttcttcacataaaaactacccagaagcattctgagaaacttctttgtgatctgtgcattcatctcacagagttgaatctttcttttgatacagcagttttgaaacgctatttttttagaatctgcaggtggatatttggagccttttgaggcctatagtggagaaggaaatatcttcacataaaaactatgcagaagcattctgagaaacttctttgtgatgtgtgcattcatctcacagagttgaatgtctctgttgattgagcagttttgaaacactctttttatagaatctgcaagtggatatttggagttcattggggcctgctgtggaaaaacaaatatcttcacataaaaactacacagaggatttctgataaacacctttgtgaggtgtgcactgaagtcacagtgttgaacctatcttttgattcaccagttttgaatctctctttttacagaacctgcgagtggatatttggagcgctttgaggcgtactgtggaaaatgaaacatcttcacacaaaaactgcacagaagcattcagagaaccttctttctgatgagtgcattcatcacagagttgaacctttgttttgatttagtagttttgagacaatcattccgtagaatctggaagtgaatatttgtagggatttgagttgtgttttggagaaggagatatcttcatataaaaactgtacagaagcattctgtgaaacttatttgtgatgtgtgcattcaaatcacattgttgaacgtatctgttgattgagcagtttagaatctctctttttgtagattctgcaagcgaatatttggagccctatttcgccctagagtggaaaaggaaatatcttcaaatagaaactacacagacatctgccaccatgcccggctactttttgtattttcagtagagacggggtttcaccatgttagccaggattgtctcgatactctgacctcgaggatccacctgcctcggcctcccaaaatgctgggattagaggcgtgagccaccaatctctcttttttttttgtattttagtggaaattggggtttcattggggccgactgaggaaaaacaaatatctgcccataaaaactacacagaacnnnnnnnnnnnnnnnnnnnnnnnnnnnnnnnnnnnnnnnnnnnnnnnnnnnnnnnnnnnnnnnnnnnnnnnnnnnnnnnnnnnnnnnnnnnnnnnnnnnnagcattctgagaaactactttgtgatgtgtgcattcatctcacagagtagaacctttctttggattgagcagttttgaaacactctttttttagaatctgcaagtggatatttggagccttttgaggcctatggtggagaaggaaatatcttcacataaaaactatgcagaagcattctgaggaacttctttgttatctgtgcattcatctcacagtgttgaatcattcttttgatacagaagtttagaagcactctttttttagattccgcaagtggatatttggagccttttgaggcctatagtggagaaggaaatatcttcacataaaaactatgcagaagcattctgagaaacttctttgtgatgggtgcattcatctcacagagttgaatgtctctgttgattgagcagttttgaaacactctttttgtagaatctgcaagtggatatttggagctcattggggactactgtggaaaaacaaatatcttcacataaaaactacacagaagcattctgagaaacttctttgtgatctgtgcattcatctcacagagttggatgtttctattgatacagcagttttgaaacactctttttttagaatctgtaaaaggatatttggagtcatttcaggcctacagtgtagaaggaaatatcttcacataaaaactacacagaagcattcggcaaaacttctttgtgatgtgtgcattcatctcacagagttgaatgtctttgttgattgagcagttttgaaacactctttttgtagaatctgcaagtggatatttggagctcattggggcctacagtggaaaaacaaataacttctcataaaaactacacagaagcattctgagaaacacctttgtgagttgtgcacggaagtcacgttgttgaacgtatcttttgattcagcagttttgaatctctctttttacagaatctgagagtggatatttggagggctttgaggcgtactgttgaaaatgaaatatcttcacacaaaaactacacagaagcattcagagaaacttctttctgatgagagcattcatcacagagttgaacctttgttttgatttagcagttttgagacaatctttccgtagaatctgcaagtaaatatttggagggctttgagttctgttttggagaaggagatatcttcatataaaaactatacagaagcattctgataaacttctttctgatgtgtgcattcaaccaacaatgttgaaagtatctgttgattgagcagattagaatctctctttttgtagaatctgcaagtgaatatttggagccctatttcgccctatagtggaaaaggaaatatcttcaaatagaagctacacagaagcattctgagaaacttctttgtggtgtgtgcattcaactcacagagttgaacttaacttttgacagagcagttttgaaactctctttatgtagaatctccaagtgcatatttggagccctttgttgcctatggtggaaaaggaaatatcttcacctaaaagctacacagaagcattctgagaaagttgtttgtgatgtgtgcattcatctcacaaagttgaacttttcttttgattgagccgtttggaaactctctttttgttgaatctgcaggtggatatttggagcgctttgaagcctatggtggacaaggaaacatcttcatataaaaactctacagaagctttatgagaaacttctttgtgatctgtgcatccatctcacagagttgaatctttcttttgatacagcagttttgaaacactatttttttagaatctacaagtggatatttggagcctttgaggcctatagtggggaaggaaatatcttcacataaaaactatgcagaagcattctgagaaacttctttgtgatgtgtgcattcatctcacagagttgaatgtctctgttgattgagcagttttgaaacactctttttatagaatctgcaagtggatatttggagttcattggggcctgctgtggaaaaacaaatatcttcacataaaaactacacagaagatttctgagaaacacctttgtgaggtgtgcactgaagtcccagtattgaacctatcttttgattcagcagttttgaatctctctttttacagaggctgagactggatatttggagcgctttgaggcgtactgtggaaaatgaaatatcttcacacaaaaactacacagaagcattcagagaaccttctttctgatgagtgcattcatcacagagttgaacctttgttttgatttagtagttttgagacaatcattccgtagaatctggaagtgaatatatgtagggatttgagttgtgttttggagaaggagatatcttcatataaaaactgtacagaagcattctgtgaaacttatttgtgatgtgtgcattcaactcacgttgttgaacgtatctgttgattgagcagtttagaatctctctttttgtagattctgcaagtgaatatttggagccctatttcaccctagagtggaaaaggaaatatcttcaaatagaaactacacagaagaattctgcgaaactactttctgatgtttgcatccatctcacagagtagaacctttcttttgattgagcagttttgacacactcttttgtaggatctgcaagtggatatttagagcgacttgaggcctattctgggtagggaaatttcttcaaataaaaactacccagaaacattctgagaaactactttatgatgtgttcattcatctcacagagtagaacctttctttggattgagctgttttgaaacagtctttttttcgaatctgcaagtggatatttggagccttttgagacctatagtggagaaggaaatatcttcacataaaaactatgcagaagcattctgagaaacttctttgcgatctgtgcattcatctcacagagttgaatctttgttttgatacagcagttttgaaacactctttttttagaatccgcaagtggatatttggagccttttgaggcctatagtggagaaggaaatatcttcacataaaaactatgcagaagcattctgagaaacttctttgtaatgggtgcattcatctcacagagttgaatgtctctgttgagtgagcagttttgaaacactctttttgtagaatctgcaagtgggtatttggagctcattggggcctactgtggaaaaacaaatatcttcacataaaaactacacagaagatttctgaggaacatctttgtgaattgtgcacctaagtcacagtgttgaacctatcttttgattcagcagttggaatctctgtttttacagaatctgagagtggatatttggagcgctttgaggcatactgtggaaaatgaaatgtcttcacacaaaaactacacagaagcattcagagaaccttctttctgatgagtgcattcatcacagagttgaacctttgttttgatttagcagttttgacacaatctttccgtacaatctggaagtgaatatttggagggctttgagatctgttttggaggaggagatatcttcatataaaaactacacagaagcattctgtgaaacttatttgcgatgtgtgcattcaactcacattgttgaaggtatctgttgattgagcagtttagaatctccctttttgtagaatctgcaagtgaatatttggggccctattttgccctatattggaaaaggaaatatcttcaaatagaaactacacagaagcattctgagaaactactctgtgttgcgtgcattcatctcacagggtacaacctttctttggattgagcagtgttgaaacactctttttgtagaatctgcaagtggatatttagagtgatttgaggcctattgtggaaagggaaatttcttcaactaaaaactacccagaagcattctgagaaacttctttgtgatctgtgcattcatctcacagagttggatgtttctattgatacagcagttttgaaacactctttttttagaatctgtaaatggatatttggagtcttttcaggcctacagtgtagaaggaaatatcttcacataaaaactatgcagaagcattcggcaaaacttctttgtgatgtgtgcattcatctcacagagttgaatgtctctgttgattgagtagttttgaaacactctttttgtagaatctgcaagcagatatttggagctcattggggcctactgtggaaaacaaataacttctcataaaaactacacagaagcattctgagaaacacctttgtgagttgtgcactgaagtcacgttgttgaacgtatcttttgattcagcagttttgaatctctctttttacagaatctgagagtggatatttggagcgctttgaggcatactgttgaaaatgaaatatcttcacacaaaaactacacagaagcattcagagaaacttctttctgatgagagcattcatcgcagagttgaacctttgttttgatttagcagttttgagacaatctttccgtagaatctggaagtaaatatttggagggctttgagttctgttttggagaaggagatatcttcatataaaaactatacagaagcattctgtgaaacttatttgtgatgtgtgcattcaaccaacaatgttgaaagtatctgttgattgagcagattagaatctctctttttgtagaatctgcaagtgaatatttggagccctatttcgccctatagtggaaaaggaaatatcttcaaatagaagctacacagaagcattctgagaaactactttgtgatgtgtgcattcacctcacagagtacaacctttcttttgactgagcagtattgaaacattctttctgtagaatctgcaagtggatatttagagcaatttgaggcctattgtggaaagggaaatttcttcaaataaaaactacccagaagctttatgagaaacttctttgtgatctgtgcatccatctcacagagttgaatctttcttttgatacagcagttttgtaacactatttttttagaatctacaagtggatatttggagcctttgaggcctatagtggggaaggaaatatcttcacataaaaactatgcagaagcattctgagaaacttctttgtgatgtgtgcattcatctcacagagttgaatgtctctgttgattgagcagttttgaaacactctttttgtagaatctgcaagtggatatttggagttcattggggcctgctgtggaaaaacaaatatcttcacataaaaactacacagaagatttctgataaacacctttgtgagttgtgcactgaagttacagtgttgaacctatcttttgattcaccagttttgaatctctctttttacagaacctgcgagtggatatttggagcgatttgaggcgtactgtggaaaatgaaatatcttcacacaaaaactgcacagaagcattcagagaaccttctttctgatgagtgcattcatcacagagttgaacctttgttttgatttagtagttttgagacaatcattccgtagaatctggaagtgaatatttgtagggatttgagttgtgttttggagaaggagatatcttcatataaaaactgtacagaaagcattctgtgaaacttatttgtgatgtttgcattcaactcacattgttgaacgtatctgttgattgagcagttgagaatctctctttttgtagaatctgcaattgaatatttggagccctatttcgccctatattggaaaaggaaatatcttcaaatagaaactacacagaagaattctgcgaaactactttctgatgtttgcatccatctcacagagtagaacctttcttttgattgagcagttttgacacactctttttgtaggatctgcaagtggatatttagagcgacttgaggcctgagctgggtagggaaatttcttcaaataaaaactacccagaagcattctgagaaactactttatgatgtgttcattcatctcagagagtagaacctttctttggattgagctgttttgaaacagtctttttttcgaatctgcaagtggatatttggagccttttgagacctatagtggagaaggaaatatcttcacataagaactatgcagaagcattctgagaaacttctttgtgatctgtgcattcatctcacagtgttgaatcattcttttgatacagaagtttagaagcactctttttttagaatccgcaagtgggtatttggagccttttgaggcctaaagtggagaaggaaatatcttcacatataaactatgcagaagcattctgagaaacttctttgtgatgggtgcattcatctcacagagttgaatgtctctgttgattgagcagttttgaaacactctttttgtagaatctgcaagtggatatttggagctcattggggactactgtggaaaaacaaatatcttcacataaaaactacacagaagatttctgaggaacatctttgtgaattgtgcacctaagtcacagtgttgaacctatcttttgattcagcagtttggaatctctctttttacagaatctgagagtggatatttggagcgctttgaggcatactgtggaaaatgaaatgtcttcacacaaaaactacacagaagcattcagagaaccttctttctgatgagtgcattcatcacagagttgaacctctgttttgatttagcagttttgacacaatctttctgtacaatctggaagtgaatatttggagggctttgagatctgttttggaggaggagatatcttcatataaaaactacacagaagcattctgtgaaacttatttgcgatgtgtgcattcaactcacattgttgaaggtatctgttgattgagtagtttagaatctctctttttgtagaatctgcaagtgaatatttgggaccctattttgccctatattggaaaaggaaatatcttcaaatagaaactacacagaagcattctgagaaactactttgtgatgtgtgcattcatctcacagggtacaacctttctttggattgagcagttttgaaacactctttttgtagaatctgcaagtggatatttagagtgatttgaggcctattgtggaaagggaaatttcttcaaataaaaactacccagaagcattctgagaaacttctttgtgatctgtgcattcatctcacagagttggatgtttctattgatacagcagttttgaaacactctttttttagaatctgtaaatggatatttggagtcttttcaggcctacagtgtagaaggaaatatcttcacataaaaactatgcagaagcattcggcaaaacttatttgtgatgtgtgcattcatctcacagagttgaatgtctctgttgattgagtagttttgaaacactctttttgtagaatctgcaagtagatatttggagctcattggggcctactgtggaaaaacaaataacttctcataaaaactacacagaagcattctgagaaacacctttgtgagttgtgcactgaagtcacgttgttgaacgtatcttttgattcagcagttttgaatctctctttttacagaatctgagagtggatatttggagcgctttgaggcgtactgttgaaaatgaaatatcttcacacaaaaactacacagaagcattcagagaaacttctttctgatgagagcattcatcacagagttgaacctttgttttgatttagcagttttgagacaatctttccgtagaatctggaagtaaatatttggagggctttgagttctgttttggagaaggagatatcttcatataaaaactatacagaagcattctgagaaacttatttgtgatgtgtgcattcaactcacagtgttgaacctatctgttgattgagcagtttagaatctctctttttatagaatctgcaagtgaatatttggagccctatttcaccctatagtggaaaaggaaatatcttcaaatagaaactacacagaagcattctgagaaactactttgtgatgtgtgcattcatctcacagagtagaacctttcttttgattgagcagttttgaaacactctttttgtagaatctgaaagtggatatttagagcaatttgaggcttattgtggaaagagaaatatcttcaaataaaaactacccagaagcattctgagaaacttctttgtgatctgtgcattaatctcactgagttgaatctttcttttgatacagcagttttgaaacactatttttttagaatctgtaggtggatatttggagccttttgaggcctatagtggagaaggaaatatcttcacataaaaactacgcagaagcattctgagaaacttctttgtgatgtgtgcattcatctcacagagttgaatgtctctgttgattgagcagttttgaaacactctttttgtagaatctgaaagtggatatttggagctcattggggcctactgtggaaaaacaaatatcttcacataaaaactacaaagaagcattctgagaaacatctgtgtgaggtgtgcactgaagtcacattgttgaacctatcttttgattcagcagttttgaatctatctttttgcagaatctgcgagtggatatttggagcgctttgaggcgtactgtggaaaatcaaatatcttcacataaaaactacacagaagcattcagagaaccttctttctgatgagtgcattcatcacagatttgaacctttgttttcatttagcagttttgagataatctttccgtagaaactggaagtgaatatttggagggctttgagttctgttttggataaggagatatcttcatataaaaactacacagaagcattctgataaacttctttctgatgtgtgcattcaaccaacaatgttgaaagtatctgttgattgagcagattagaatctctctttttgtagaatctgcaagtgaatatttggagccctatttcgccctatagtggaaaaggaaatatcttcaaatagaagctacacagaagcattctgagaaactactttgtgaagtgtgcattcacctcacagagtacaacctttcttttgactgagcagttttgaaacattctttctgtagaatctgcaagtggatatttagagcaatttgaggcctattgtggaaagggaaatttcttcaaataaaaactacccagaagctttatgagaaacttctttgtgatctgtgcatccatctcacagagttgaatctttcttttgatacagcagttttgaaacactatttttttagaatctacaagtggatatttggagcctttgaggcctatagtggggaaggaaatatcttcacataaaaactatgcagaagcattcggcgaaacttctttgtgatgggggcattcatctcacagagttgaatgtctctgttgattgagcagttttgaaacactctttttatagaatctgcaagtggatatttggagttcattggggcctgctgtggaaaaacaaatatcttcacataaaaactacacagaaagcattcttataaacatctttgtgagttgtgcactgaagtcacagtgttgaacctatcttttgattcagcagttttgaatctctctttttacagaatctgggagtggatatttggagcgctttgaggcgtactgtggaaaatgaaatatcttcacacaaaaactgcacagaagcattcagagaaccttctttctgatgagtgcattcatcacagagttgaacctttgttttgatttagtagttttgagacaatcattccgtagaatctggaagtgaatatttgtagggatttgagttgtgttttggagaaggagatatcttcatataaaaactgtacagaagcattctgtgaaacttatttgtgatgtgtgcattcaactcatattgttgaacgtatctgttgattgagcactttagaaactccctttttgtagaatctgcaagtgaatatttggagccctatttcaccctatagtggaaaaggaaatgtcttcaaatagaaactacacagaagaattctgcgaaactactttctgatgtttgcatccatctcacagtgtagaacctttcttttgattgagcagttttgacacactctttttgtaggatctgcaagtggatatttagagcgacttgaggcctattctgggtaaggaaatttcttcaaataaaaactacccagaagcattctgagaaactactttatgatgtgttcattcatctcacagagtagaacctttctttggattgagctgttttgaaacagtctttttttcgaatctgcaagtggatatttggagccttttgagacctatagtggagaaggaaatatcttcacataaaaactatgcagaagcattctgagaaaacttctttgtgatctgtgcattcatctcacagtgttgaatctttcttttgatacagaagtttagaagcactctttttttagaatccgcaagtggatatttggagccttttgaggcctatagtggagaaggaaatatcttcacataaaaactatgcagaagcattctgagaaacttctttgtgatgtgtgcattcatctcacagagttgaatgtctctgttgattgagcagttttgaaacactctttttgtggaatctgcaagtggatatttggagctcattggggcctactgtggaaaatcaaatatcttcacataaaaactacacagaagcattctgagaaacatctttgtgagttgtgcactgaagtgacagtgttgaacctatcttttgattcagcagttttgaatctctctttttacagaatctgagagtggatatttggagcgctttgaggcgtactgtgcaaaatgaaatatcttcacacaaaaactacacagaagcattcagagaaccttctttctgatgagtgcattcatcacagagttgaacctttgttttgatttagcagttttgacacaatctttccgtacaatctggaagtgaatatttggagggctttgagttctgttttggagaaggagatatcttcatataaaaactacacagaagcattctgtgaaacttatttgcgatgtgtgcattcaactcacattgttgaaggtatctgttgattgagcagtttagaatctccctttttgtagaatctgcaagtgaatatttggggccctattttgccctatattggaaaaggaaatatcttcaaatagaaactacacagaagcattctgagaaactactttgtgatgcgtgcattcatctcacagggtacaacctttctttggattgagcagttttgaaacactctttttgtagaatctgcaagtggatatttagagtgatttgaggcctattgtggaaagggaaatttcttcaactaaaaactacccagaagcattctgagaaacttctttgtgatctgtgcattcatctcacagagttgcatgtttctattgatatagcagttttgaaacactttttttttagaatctgtaaatggatatttggagccttttcaggcctacagtgtagaaggaaatatcttcacataaaaactatgcagaagcattctgagaaacttctttgtgatgtctgcattcatctcacagagttgaatgtctctgttgattgagcagttttgaaacactctttttgtggaatctgcaagtggatatttggagctcattggggcctactgtggaaaatcaaatatcttcacataaaaactacacagaagcattctgagaaacatctttgtgagttgtgcactgaagtgacagtgttgaacctatcttttgattcagcagttttgaatctctctttttacagaatctgagagtggatatttggagcgttttgaggcgtactgtggaaaatgaaatatcttcacacaaaaactacacagaagtattctgagaaacttctttgtgacgtgtgcattcatctcacagagttgaacctttattttgactgagcagttttgagacaatctttccatataacctggaagtgaatatttggagggctttgagttctattttggagatggagatatcttcatgtgaaaactacatagaagcattctgtgaaacttatttgtgatgtgtgcattcaaccaacaatgttgaaagtatctgttgattgagcagattagaatctctctttttgtagaatctgcaagtgaatatttggagccctatttcgccctatagtggaaaaggaaatatcttcaaatagaagctacacagaagcattctgacaaactactttgtgatgtgtgcattcatctcacagagtagtacctttctttggattgagcagttttgaaacactctttttttagaatctgcaagtggatatttagagcgatttgaggcctattgtggaaagggaaatttcttcaaataaaaactacccagaagctttatgagaaacttctttgtgatctgtgcatccatctcacagagttgaatctttcttttgatacagcagttttgaaacactatttttttaggatctacaagtggatatttggagccttttgaggcctatagtggagaaggaaacatcttcacataaaaactatgcagaagcatcggcgaaacttctttgtgatgggtgcattcatctcacagagttgaatgtctctgttgattgagcagttttgaaacactctttttatagaatctgcaagtggatatttggagttcattggggcctgctgtggaaaaacaaatatcttcacataaaaactacacagaagatttctgagaaacacctttgtgaggtgtgcactgaagtcacattgttgaacctatcttttggttcagcagttttgaatctctctttttacagaacctgcgagtggatatttggatcgctttgaggcatactgtggaaaatgaaatatcttcacaaaaaaactacacagaagcattcagagaaccttctttctgatgagtgcattcatcacagagttgaacctttgttttgatttagtagttttgagacaatcattccgtagaatctggaagtgaatatttgtagggatttgagttgtgttttggagaaggagatatcttcatataaaaactgtacagaagcattctgtgaaacttatttgtgatgtgtgcattcaactcacattgttgaacgtatctgttgattgagcagtttagaatctctctttttgtagattctgcaagtgaatatttggagccctatttcgccctagagtggaaaaggaaatatcttcaaatagaaaccacacagaagaattctgcgaaactactttctgatgtttgcatccatctcacagtgtagaacctttcttttgattgagcagttttgacacactctttttgtaggatctgcaagtggatatttagagcgacttgaggcctattctgggtaaggaaatttcttcaaataaaaactacccagaagcattctgagaaactactttgtgatgtgtgcattcatctcacagagtagaacctttctttggattgagcagttttgaaacactctttttttagaatctgcaagtggatatttggagccttttgaggcctatggtggagaaggaaatatcttcacataaaaactatgcagaagcattctgagaaacttttttgtgatctgtgcattcatctcacagtgttgaatcattcttttgatacagaagtttagaagcactctttttttagaatccgcaagtggatatttggagccttttgaggcctatagtggagaaggaaatatcttcacataaaaactatgcagaagcattctgagaaacttctttgtgatgggtgcattcatctcacagagttgaatgtctctgttgattgagcagttttgaaacactctttttgtagaatctgcaagtggatatttggagctcattggggactactgtggaaaaacaaatatcttcacataaaaactacacagaagatttctgaggaacatctttgtgaattgtgcacctaagtcacagtgttgaacctatcttttgattcagcagttggaatctctgtttttacagaatctgagagtggatatttggagcgctttgaggcatactgtggaaaatgaaatgtcttcacacaaaaactacacagaagcattcagagaaccttctttctgatgagtgcattcatcacagagttgaacctttgttttgatttagcagttttgacacaatctttccgtacaatctggaagtgaatatttggagggctttgagatctgttttggaggaggagatatcttcatataaaaactacacagaagcattctgtgaaacttatttgcgatgtgtgcattcaactcacattgttgaaggtatctgttgattgagcagtttagaatctccctttttgtagaatctgcaagtgaatatttggggccctattttgccctatattggaaaaggaaatatcttcaaatagaaactacacagaagcattctgagaaactactctgtgatgcgtgcattcatctcacagggtacaacctttctttggattgagcagttttgaaacactctttttgtagaatctgcaagtggatatttagagtgatttgaggcctattgtgtaaagggaaatttcttcaactaaaaactacccagaagcattctgagaaacttctttgtgatctgtgcattcatctcacagagttggatgtttctattgatacagcagttttgaaacactctttttttagaatctgtaaacggatatttggagtcttttcaggcctacagtgtagaaggaaatatcttcacataaaaactatgcagaagcattcggcaaaacttatttgtgatgtgtgcattcatctcacagagttgaatgtctctgttgattgagtagttttgaaacactctttttgtagaatctgcaagtagatatttggagctcattggggcctactgtggaaaaacaaataacttctcataaaaactacacagaagcattctgagaaacacctttgtgagttgtgcactgaagtcacgttgttgaacgtatcttttgattcagcagttttgaatctctctttttacagaatctgagagtggatatttggagcgctttgaggcatactgttgaaaatgaaatatcttcacacaaaaactacacagaagcattcagagaaacttctttctgatgagagcattcatcacagagttgaacctttgttttgatttagcagttttgagacaatctttccgtagaatctggaagtaaatatttggagggctttgagttctgttttggagaaggagatatcttcatataaaaactatacagaagcattctgtgaaacttatttgtgatgtgtgcattcaaccaacaatgttgaaagtatctgttgattgagcagattagaatctctctttttgtagaatctgcaagtgaatatttggagccctatttcgccctatagtggaaaaggaaatatcttcaaatagaagctacacagaagcattctgacaaactactttgtgatgtgtgcattcatctcacagtagtagtacctttctttggattgagcagttttgaaacactctttttttagaatctgcaagtggatatttagagcgatttgaggcctattgtggaaagggaaatttcttcaactaaaaactacccagaagctttatgagaaacttctttgtgatctgtgcatccatctcacagagttgaatctttcttttgatacagcagttttgaaacactatttttttaggatctacaagtggatatttggagccttttgaggcctatagtggagaaggaattatcttcacataaaaactatgcagaagcattctgagaaacttctttgtgatgtgtgcattcatctcacagagttgaatgtctctgttgattgagcagttttgaaacactctttttatagaatctgcaagtggatatttggagttcattggggcctgctgtggaaaaacaaatatcttcacatagaaactacacagaagatttctgagaaacacctttgtgagttgtgcactgaagtcacagtgttgaacctatcttttgattcagcagttttgaatctctctttttacagaacctgcgagtggatatttggagcgctttgaggcgtactgtgcaaaatgaaatatcttcacacaaaaactacacagaagcattcagagaaccttctttctgatgagtgcattcatcacagagttgaacctttgttttgatttagcagttttgacacaatctttccgtacaatctggaagtgaatatttggagggctttgagttctgttttggagaaggagatatcttcatataaaaactacacagaagcattctgtgaaacttatttgtgatgtgtgcattcaactcacaatgttgaacgtatccgttgattgagcagattagaatctctccttttgtagaatctgcaagtgaatatttggagccctacttcgccctagagtggaaaaggaaatatcttcaaatagaaactacacagaagaattctgcgaaactactttctgatgtttgcatccatctcacagagtagaaccttcttttgattgagcagttttgacacactctttttgtaggatctgcaagtggatatttagagcgacttgaggcctattctgggtagggaaatttcttcaagtaaaaactacccagaagcattctgagaaactactttatgatgtgttcattcatctcacagagtagaacctttctttggattgagctgtgttgaaacagtctttttttcgaatctgcaagtggatatttggagccttttgagacctatagtggagaaggaaatatcttcacataaaaactatgcagaagcattctgagaaacttctttgtgatctgtgcattcatctcacagtgttgaatcattcttttgatacagaagtttagaagcactctttttttagaatccgcaagtggatatttggagccttttgaggcctatagtggagaaggaaatatcttcacataaatactatgcagaagcattctgagaaacttctttgtgatgggtgcattcatctcacagagttgaatgtctctgttgattgagcagttttgaaacactctttttgtagaatctgcaagcggatatttggagctcattggggactactgtggaaaaacaaatatcttcacataaaaactacacagaagatttctgaggaacatctttttgaattgtgcacctaagtcacagtgttgaacctatcttttgattcagcagtttggaatctctctttttacagaatctgagagtggatatttggagcgctttgaggcatactgtggaaaatgaaatgtcttcacacaaaaactacacagaagcattcagagaaccttctttctgatgagtgcattcaccacagagttgaacctttgttttgatttagccgttttgacacaatctttccgtacaatctggaagtgaatatttggagggctttgagatctgttttggaggaggagatatcttcatataaaaactacacagaagcattctgtgaaacttatttgcgatgtgtgcattcaacttacattgttgaaggtatctgttgattgagtagtttagaatctctctttttgtagaatctgcaagtgaatatttggggccctattttgccctatattggaaaaggaaatatcttcaaatagaaactacacagaagcattctgagaaactactctgtgacgcgtgcattcatctcacagggtacaacctttctttggattgagcagttttgaaacactctttttgtagaatctgcaagtggatatttagagtgatttgaggcctattgtggaaagggaaatttcttcaactaaaaactacccagaagcattctgagaaacttctttgtgatctgtgcattcatctcacagagttggatgtttctattgatatagcagttttgaaacactctttttttagaatctgtaaatggatatttggagccttttcaggcctacagtgtagaaggaaatatcttcacataaaaactatgcagaagcattctcagaaacttctttgtgaggtgtgcattcatctcacagagttgaatgtctctgttgattgagcagttttgaaacactctttttgtagaatctgcaagtggatatttggagctcattggggcctactgtggaaaaacaaatatcttcacataaaaactacacagaagcattctgagaaacatctttgtgaggtgtgcactgaagtcacattgttgaacctatcttttgattcagcagttttgaatctctctttttgcagaatctgcgagtggatatttggagcactttgaggcgtactgtggaaaatcaaatatcttcacataaaaactacacagaagcattcagggaacctaatttctgatgagtgcattcatcacagagttgaacctttgttttgatttagcagttttgaggcaatctttctgtagaatctggaagtaaatatttggagggctttgaattctgttttggagaaggagatatcttcatataaaaactacacagaagcattctgtcaaccttatttgtgatgtgtgcattcagctcacattgttgaacgtatcttttgattcagcagttttgaatctttctttttacagaatctgtgagtggatatttggagcgctttgaggcgtactgtggaaaatgaattatcttcacacaaaaactacacagaagcattctgagaaactactttgtgatgtgtgcattcacctcacagagtacaacctttcttttgactgagcagctttgaaacattctttctgtagaatctgcaagtggatatttagagcaatttgaggcctattgtggaaagggaaatttcttcaaataaaaactacccagaagctttatgagaaacttctttgtgatctgtgcatccatctcacagagttgaatctttcttttgatacagcagttttgaaacactatttttttagaatctacaagtggatatttggagcctttgaggcctatagtggggaaggaaatatcttcacataaaaactatgcagaagcattcggcgaaacttctttgtgatgggtgcattcatctcacagagttgaatgtctgtgttgattgaacagttttgaaacactcttttaatagaatctgcaagtggatatttggagttcattggggcctgctgtggaaaaacaaatatcttcacataaaaactacacagaagatttctgataaacacctttgtgagttgtgcactgaagtcacagtgttgaacctatcttttgattcaccagttttgaatctctctttttacagaacctgcgagtggatatttggagcgctttgaggcgtactgtggaaaatgcaatatcttcacacaaaaactgcacagaagcattcagagaaccttctttctgatgagtgcattcatcacagagttgaacctttgttttgatttagtagttttgagacaatcattccgtagaatctggaagtgaatatttgtagggatttgagttgtgttttggagaaggagatatcttcatataaaaactgtacagaagcattctgtgaaacttatttgtgatgtttgcattcaactcacattgttgaacggtatctgttgattgagcagttgagaatctctctttttgtagaatctgcaattgaatatttggagccctatttcgccctatattggaaaaggaaatatcttcaaatagaaactacacagaagaattctgcgaaactactttctgatgtttgcatccatctcacagtgtagaacctttcttttgattgagcagttttgacacactctttttgcaggatctgcaagtggatatttagagcgacttgaggcctattctgggtaaggaaatttcttcaaataaaaactacccagaagcattctgagaaactactttatgatgtgttcattcatctcacagagtagaacctttctttggattgagctgttttgaaacagtctttttttcgaatctgcaagtggatatttggagccttttgagacctatagtggagaaggaaatatcttcacataagaactatgcagaagcattctgagaaacttctttgtgatctgtgcattcatctcacagtgttgaatcattcttttgatacagaagtttagaagcactctttttttagaatccgcaagtggatatttggagccttttgaggcctatagtggagaaggaaatatcttcacttaaaaactatgcagaagcattctgagaaacttctttgtgatgggtgcattcatctcacagagttgaatgtctctgttgattgagcagttttgaaacactctttttgtagaatctgcaagtggatatttggagctcattggggactacggtggaaaaacaaatatcttcacataaaaactacacagaagatttctgaggaacatctttgtgaattgtgcacctaagtcacagtgttgaacctatcttttgattcagcagtttggaatctctctttttacagaatctgagagtggatatttggagcgctttgaggcatactgtggaaaatgaaatgtcttcacacaaaaactacacagaagcattcagagaaccttctttctgatgagtgcattcatcacagagttgaacctttgttttgatttagccgttttgacacaatctttccgtacaatctggaagtgaatatttggagggctttgagatctgttttggaggaggagatatcttcatataaaaactacacagaagcattctgtgaaacttatttgtgatgtgtgcattcatctcacattgttgaaggtatctgttgattgagcagtttagaatctctctttttgtagaatctgcaagtggatatttggagccccttgcaacctatggtggtaaaggaaataccttcaaataaaaactacatagaagcattctgagaaactactctgtgatgcgtgcattcatctcacaggttacaacctttctttggattgagcagttttgaaacactctttttgtagaatctgcaagtggatatttagagtgatttgaggcctattgtggaaagggaaatttcttcaactaaaaactacccagaagcattctgagaaacttctttgtgatctgtgcattcatctcacagagttgcatgtttctattgatatagcagttttgaaacactttttttttagaatctgtaaatggatatttggagccttttcaggcctacagtgtagaaggaaatatcttcacataaaaactatgcagaagcattcggcaaaacttctttgtgatgtgtgcattcatctcacagagttgaatgtctctgttgattgagcagttttgaaacactctttttgtagaatctgcaagtggatatttggagctcattggggcctactgtggaaaaacaaataacttctcataaaaactacacagaagcattctgagaaacatctttgtgagttgtgtactgaagtcacgttgttgaacgtatcttttgattcagcagttttgaatctctctttttacagaatctgagagtggatatttggagcgctttgaggcgtactgttgaaaatgaaatatcttcacacaaaaactacacagaagcattttgagaaacttctctgtgacgtgtgcattcatatcacagaattgaacccttgttttgactgagcagttttgagacgatctttccgtagaatctggaagtgaatatttggagggctttgagttctattttggagatggagatatcttcatatgaaaactacatagaagcattctgtgaaacttatttctgatgtgtgcattcaactcacaatgttgaacgtatctgttgattgagcagattagaatctctctttttgtagaatctgcaagtgaatatttggagccctatttcgccctagagtggaaaaggaaatatcttcaaatagaaactacacagaagcattctcagaaactactttgtgatgcgtgcattcatcccacagagtagaacctttctttggattgagcagttttgaagaactctttttgtagaatctgcaagtggatatttagagcgacttgaggcctattgtggaaagggaaatttcttcaaataaaaacttcccagaagcattctgagagacttctttgtgatccgtgcattcatctcacagaatagaatctttctttggattgagcagtattgaaacagtctttttttagaatctgcaagtggatatttggagccttttcaggactatagtggagaaggaaatatcttcacataaaaactatgcagaagcattctgagaaacttctttgtgatctgtgcattcatctcacagtgttgaatcattcttttgatacagaagtttagaagcactctttttttagaatccgcaagtggatatttggagccttttgaggcctatagtggagaaggaaatatcttcacttaaaaactatgcagaagcattctgagaaacttctttgtgatgggtgcattcatctcacagagttgaatgtctctgttgattgagcagttttgaaacactctttttgtagaatctgcaagtggatatttggagctcattggggactactgtggaaaaacaaatatcttcacataaaaactacacagaagatttctgaggaacatctttgtgaattgtgcacctaagtcacagtgttgaacctatcttttgattcagcagtttggaatctctctttttacagaatctgagagtggatatttggagcgctttgaggcatactgtggaaaatgaaatgtcttcacacaaaaactacacagaagcattcagagaaccttctttctgatgagtgcattcatcacagatttgaacctttgttttgatttagcagttttgacacaatctttccgtacaatctggaagtgaatatttggagggctttgagatctgttttggaggaggagatatcttcatataaaaactacacagaagcattctgtgaaactaatttgcgatgtgtgcattcaactcacattgttgaaggtatctgttcattgagtagtttagaatctctctttttgtagaatctgcaagtgaatatttggggccctattttgccctatattggaaaaggaaatatcttcaaatagaaactacacagaagcattctgagaaactactctgtgatgcgtgcattcatctcacagggtataacctttctttggattgagcagttttgaaacactctttttgtagaatctgcaagtggatatttagagtgatttgaggattattgtggaaagggaaatttcttcaactaaaaactacccagaagcattctgagaaacttctttgtgatctatgcattcatctcacagagttggatgtttctattgatacagcagttttgaaacactctttttttagaatctgtaaatggatatttggagtcttttcaggcctacagtgtagaaggaaatatcttcacataaaaactatgcagaagcattcggcaaaacttgtttgtgatgtgtgcattcatctcacagagttgaatgtctctgttgattgagcagttttgaaacactctttttgtagaatctgcaagtggatatttggagctcattggggcctactgtggaaaaacagataacttctcataaaaactacacagaagcattctgtcaaccttatttgtgatgtgtgcattcagctcacattgttgaacgtatcttttgattcagcagttttgaatctttctttttacagaatctgcgagtggatatttggagcgctttgaggcgcactgtggaaaatggattatcttcacacaaaaactacacagaagcattcagagaaccttctttctgatgagcgcattcatcacagagttgaacctttgttttgatttagcagttttgaggcaatctttctgtagaatctggaagtaaatatttggagggctttgagttctgttttggagaaggagatatcttcatatacaaactacacagaagcattctgtgaaacttatttgtgatgtgtgcattcaaccaacaatgttgaaagtatctgttgattgagcagattagaatctctctttttgtagaatctgcaagtgaatatttggagccctatttcgccctatagtggaaaaggaaatatcttcaaatagaagctacacagaagcattctgagaaactactttgtgatgtgtgaattcatctcacagattagaaactttcttttgattgagcagttttgaaactctctttttttagaatctgcttgtggatatttagagcgatttgaggtctattgtggaaagggaaatttcttcaaataaaaactacccagaagctttatgagaaacttctttgtgatctgtgcatccatctcacagagttgaatctttcttttgatacagcagttttgaaacactatttttttagaatctacaagtggatatttggagcctttgaggcctatagtggggaaggaaatatcttcacataaaaactatgcagaagcattctgagaaacttctttgtgatgtgtgcattcatctcacagagttgaatgtctctgttgattgagcagttttgaaacactctttttatagaatctgcaagtggatatttggagttcattggggcctgctgtggaaaaacaaatatcttcacataaaaactacacagaagatttctgagaaacacctttgtgagttgtgcactgaagtcacagtgttgaacctatctttcgattcagcagttttgaatctctctttttacagaacctgcgagtggatatttggagcgctttgaggcgtactgtggaaaatgaaatatcttcacacaaaaactacacagaagcattcagagaaccttctttctgatgagtgcattcatcacagagttgaacctttgttttgatttagcagttttgacacaatctttccgtacaatctggaagtgaatatttggagggctttgagttctgttttggagaaggagatatcttcatataaaaactacacagaagcattctgtgaaacttatttgtgatgtgtgcattcaactcaagttgttgaacgtatctgttgattgagcagtttagaatctctcttttcgtagaatctgcaagtgaatatttggagccctatttcgccctagagtggaaaaggaaatatcttcaaatagaaactacacagaagaattctgtgaaactactttctgatgtttgcatccatctcacagagtagaacctttcttttgattgagcagttttgacacactctttttgtaggatctgcaagtggatatttagagcgacttgaggcctattctgggtagggaaatttcttcaaataaaaactacccagaagcattctgagaaactactttatgatgtgttcattcatctcacagagtagaacctttctttggattgagctgttttgaaacagtctttttttcgaatctgcaagtggatatttggagccttttgagacctatagtggagaaggaaatatcttcacataaaaactatgcagaagcaacctgagaaacttctttgtgatctgtgcattcatctaacagagttgaatctttcttttgacacagcagttttgaaacactcttttttcagaatctgcaagtggatatttggagccttttgaggcctatagtggagaaggaaatatcttcacataaaaactatgcagaagcattctgagaaacttctttgtgatgggttcattcatctcacagagttgaatgtatctgttgattgagcagttttgaaacactgtttttgtagaatctgcaagtggatatttggagctcattggggactactgtggaaaaacatatatcttcacataaaaactacacagaagatttctgaggaacatctttgtgaattgtgcacctaagtcacagtgttgaacctatcttttgattcagcagtttggaatctcactttttacagaatctgagagtggatatttggagcgctttgaggcatactgtggaaaatgaaatgtcttcacacaaaaactacacagaagcattcagagaaccttctttctgatgagtgcattcatcacagagttgaacctttgttttgatttagcagttttgacacaatctttccgtacaatctggaagtgaatatttggagggctttgagatctgttttggaggaggagatatcttcatataaaaactacacagaagcattctgtgaaacttatttgcgatgtgtgcattcaactcacattgttgaaggtatctgttgattgagcagtttagaatctccctttttgtagtatctgcaagtgaatatttggggccctattttgccctatattggaaaaggaaatatcttcaaatagaagctacacagaagcattctgagaaactactttgtgatgcgtgcattcatctcacagggtacaacctttctttggattgagcagttttgaaacactctttttgtagaatctgcaagtggatatttagagtgatttgaggcctattgtggaaagggaaatttcttcaactaaaaactacccagaagcattctgaaaaacttctttgtgatctgtgcattcatctcacagagttggatgtttctattgatatagcagttttgaaacactcttttttagaatctgtaaatggatatttggagccttttcaggcctacagtgtagaaggaaatatcttcacataaaaactatgcagaagcattctgagaaacttctttgtgatgtgtgcattcatctcacagagttgaatgtctctcttgattgagcagttttgaaacactctttttgtggaatctgcaagtggatatttggagctcattggggcctaatgtggaaaatcaaatatcttcacataaaaactatacagaagcattctgagaaacatctttgtgagttgtgcactgaagtgacagtgttgaacctatcttttgattcagcagttttgaatctctctttttacagaatctgagagtggatatttggagcgctttgaggcgtactgtggaaaatgaaatatcttcacacaaaaactacacagaagcattctgtcaaccttatttgtgatgtgtgcattcagctcacattgttgaacgtatcttttgattcagcagttttgaatctttctttttacagaatctgcgagtggatatttggagcgctttgaggcgtactgtggaaaatgaattatcttcacacaaaaactacacagaagcattcagagaaccttctttctgatgagtgcattcatcacagatttgaacctttgttttcatttagcagttttgagacaatctttccgtagaaactggaagtgaatatttggagggctttgagttctgttttggataaagggatatcttcatataaaaactacacagaagcattctgtgaaacttatttgtgatgtgtgctttcaactcacattgttgaacgtatctgttgattgagcagtttagaatctctctttttgtagaatctgcaagtgaatatttggaaccctatttcgccctagagtggaaaaggaaatatcttcaaatagaaactacacagaagcattgtgagaaactactttgtgatgtgtgcattcatctcacagagtagaacctttctttggattgagcagttttgaaacactctttttgtagaatctgtaaggggatatttagagcgatttgaggccttttgtggaaagggaaatttcttcaaattaaaactacccagaagcattctgagaaactcctttgtgatctgtgcattcatcacacagagttgaatcttccttttgatacagcagttttgaaacactctttttttagtatctgcaggtggatatttggggcattttcaggcctatagtggagaaggaaacatcttcacataaaaagtatgcagaagcattctgagaaacttctttgtgatgggtgtattcatctcacagagttgaatgtctctgctaattgagcagttttgaaacactctttttgtagaatctgcaagtggatatttggagctctttggggcctgctttggaaaaacaaatatcttcacataaaaactacacagaagatttctgataaacacctttgtgagttgtgcactgaagtcacagtgttgaacctatcttttgattcaccacttttgaatctctctttttacagaacctgcgagtggatatttggagcgctttgaggcgtactgtggaaaatgcaatatcttcacacaaaaactgcacagaagcattcagagaaccttctttctgatgagtgcattcatcacagagttgaacctttgttttgatttagcagttttgagacaatcattccgtagaatctggaagtgaatatttgtagggatttgagttgtgttttggagaaggagatatcttcatataaaaactgtacagaagcattctgagaaacttctttgtgatctgtgcattcacctcacagagtcgaatcttccttttgattcagcagttgtgaaacactatttttttagaatctgcaagtggatatttggagccttttgaggcctatagtggagaaggaaatatcttcacataaaaactatgcagaagcattctgagaaactactttgtgatgtgtgcattcacctcacagagtagaacctttctatggattgagcagttttgaaacacgctttttgtagaatctgcaagtggatatttcgagctcattggtgcctactgtggaaaaacaaatgtcttcacataaaaactacacagaagcattctgagaaactactttgtgatgtgtgcattcatctcacagagtagaacctttcttttgattgagcacttttgaaacactctttttttagaatctgcaagtggatatttggtgccttttcaggcctatagtggagaaggaaatatcttcacagaaaaactatgcagaagcattctgagaaacttttttgtgatctgtgcattcatctcacagtgttgaatcattcttttgatacagaagtttagaagcactctttttttagaatccgcaagtggatatttggagccttttgaggcctatagtggagaaggaaatatcttcacataaaaactatgcagaagcattctgagaaacttctttgtgatgggtgcattcatctcacagagttgaatgtctctgttgattgagcagttttgaaacactctttttgtagaatctgcaagtggatatttggagctcattggggcctactgtggaaaaacaaatatcttcacataaaaactacacagaagatttctgagaaacacctttgtgagttgtgcactgaagtcacagtgttgaacctatcttttgattcagcagttttgaatctctctttttacagaacctgcgagtggatatttggagcgctttgaggcgtactgtgcaaaatgaaatatcttcacacaaaaactacacagaagcattctgaaaaacttctttgttatgtgtgcattcatctcacagggttgaacctatctaatgattgagcagttttgaaacactcattttgtagaatctgcaagtggatatttggagcgctttgagaccttccgtggacaagctaatgtcttcacataaaaactacactgaagcattctgtgaaacttatttgtgatgtgtgcattcatctcacattgttgaaggtatctgttgattgagcagtttagaatctctctttttgtagaatctgcaagtggatatttggagccccttgcaacctatggtggtaaaggaaataccttcaaataaaaactacatagaagcattctgagaaactactctgtgttgcgtgcattcatctcacagggtacaacctttctttggattgagcagttttgaaacactctttttgtagaatctgcaagtggatatttagagtgatttgaggcctattgtggaaagggaaatttcttcaactaaaaactacccagaaccattctgagaaacttctttgtgatctgtgcattcatctcacagagttggatgtttctattgatacagcagttttgaaacactatttttttagaatctacaagtggatatttggagcctttgaggcctatagtggggaaggaaatatcttcacataaaaactatgcagaagcattctgagaaacttctttgtgattggtgcattcatctcacagagttgaatgtctctgttgattgagcagttttgacactctttttgtggaatctgcaagtggatatttggagctcattggggcctactgtggaaaatcaaatatcttcacataaacactacacagaagcattctgagaaacatctttgtgagttgtgcactgaagtgacagtgttgaacctatcttttgattcagcagttttgaatctctctttttacagaatctgagagtggatatttggagcgctttgaggtgtgctgtggaaaatgaaatatcttcacacaaaaactacacagaagcattcagagaaccttctttctgatgagtgcattcatcacagagttgaacctttgttttgatttagcagttttgagacaatctttccgtagaatctgcaagtaaatatttggagggctttgagttctgttttggagaaggagatatcttcatataaaaactatacagaagcattctgtgaaacttatttgtgatgtgtgcattcaaccaaaaatgttgaaagtatctgttgattgagcagattagaatctctctttttgtagaatctgcaagtgaatatttggagccctatttcgccctatagtggaaaaggaaatatcttcaaatagaagctacacagaagcattctgagaaactactttgtgaagtgtgcattcacctcacagagtacaacctttcttttgactgagcagttttgaaacattctttctgtagaatctgcaagtggatatttagagcaatttgaggcctattgtggaaagggaaatttcttcaaataaaaactacccagaagctttatgagaaacttctttgtgatctgtgcatccatctcacagagttgaatctttcttttgatacagcagttttgaaacactatttttttagaatctacaagtggatatttggagcctttgaggcctatagtggggaaggaaatatcttcacataaaaactatgcagaagcattctgagaaacttctttgtgatgtgtgcattcatctcacagagttgaatgtctctgttgattgagcagttttgaaacactctttttatagaatctgcaagtggatattcggagttcattggggcctgctgtggaaaaacaaatatcttcacataaaaactacacagaagcattctgagaaactcttttgtgaggtgtgcgctgaagtcagagtgttgaacctatcttttgattcagcagttttgaatctctctttttacagaacctgcgagtggatatttggagcgctttggggcttactgtggaaaatgaaatatcttcacacaaaaactacagagaagcattcagagaaccttctttgtgatgagtgcattcatcacagagttgaacctttgttttgatttagtagttttgagacaatcattccgtagaatctggaagtgaatatttgtagggatttgagttgtgttttggagaaggagatatcttaatataaaaactgtacagaagcattctgtgaaacttatttgtgatgtgtgcattcaactcatattgttgaacgtatctgttgattgagcagtttagaaactccctttttgtagaatctgcaagtgaatatttggagccttatttcaccctatagtggaaaaggaaatgtcttcaaatagaaactacacagaagaattctgcgaaactactttctgatgtttgcatccatctcacagtgtagaacctttcttttgattgagcagttttgacacactctttttgtaggatctgcaagtggatatttagagcgacttgaggcctattctgggtaaggaaatttcttcaaataaaaactacccagaaacattctgagaaactactttatgatgtgttcattcatctcacagagtagaacctttctttggattgagctgttttgaaacagtctttttttcgaatctgcaagtggatatttggagccttttgatacctatagtggagaaggaaatatcttcacataaaaactatgcagaagcattctgagaaacttttttgtgatctgtgcattcatctcacagtgttgaatcattcttttgatacagaagtttagaagcactctttttttagaatccgcaagtggatatttggagccttttgaggcctatagtggagaaggaaatatcttcacataaaaactatgcagaagcattctgagaaacttctttgtgatgtgtgcattcatctcacagagttgaatgtctctgttgattgagcagttttgaaacactctttttatagaatctgcaagtggatatttggagctcattggggactacggtggaaaaacaaatatcttcacataaaaactacacagaagatttctgaggaccatctttgtgaattgtgcacctaagtcacagtgttgaacctatcttttgattcagcagtttggaatctctctttttacagaatctgagagtggatatttggagtgctttgaggcatactgtggaaaatgaaatgtcttcacacaaaaactacacagaagcattcagagaaccttctttctgatgagtgcattcatcacagtgttgaacctttgttttgatttagctgttttgagacaatctttccgtaggatctggaagtgaatatttgtagggctttaagatctgttttggagaaggagatatcttcatataaaaactacacagaagcattctgtgaaacttatttgcgatgtgtgcattcaactcacattgttgaaggtatctgttgattgagcagtttagaatctccctttttgtagaatctgcaagtgaatatttggggccctattttgccctatattggaaaaggaaatatcttcaaatagaaactacacagaagcattctgagaaactactctgtgatgcgtgcattcatctcacagggtataacctttctttggattgagcagttttgaaacactctttttgtagaatctgcaagtggatatttagagtgatttgaggattattgtggaaagggaaatttcttcaactaaaaactacccagaagcattctgagaaacttctttgtgatctgtgcattcatctcacagagttggatgtttctattgatacagcagttttgaaacactctttttttagaatctgtaaatggatatttggagtcttttcaggcctacagtgtagaaggaaatatcttcacataaaaactatgcagaagcattcggcaaaacttatttgtgatgtgtgcattcatctcacagagttgaatgtctctgttgattgagtagttttgaaacactctttttgtagaatctgcaagtagatatttggagctcattggggcctactgtggaaaaacaaataacttctcataaaaactacacagaagcattctgagaaatacctttgtgagttgtgcactgaagtcacgttgttgaacgtatcttttgattcagcagttttgaatctctctttttacagaatctgagagtggatatttggagcgctttgaggcgtactgttgaaaatgaaatatcttcacacaaaaactacacagaagcattcagggaaccttctttctgatgagtgcactcatcacagagttgaacctttgttttgatttagcagttttgaggcaatctttctgtagaatctggaagtaaatatttggagggctttgagttctgttttggagaaggagatatcttcatataaaaactacacagaagcattctgataaacttctttctgatgtgtgcattcaaccaacaatgttgaaagtatctgttgattgagcagattagaatctctctttttgtagaatctgcaagtgaatatttggagccctatttcgccctatagtggaaaaggaaatatcttcaaatagaagctacacagaagcattctgagaaactactttgtgatgtgtgcattcacctcacagagtacaacctttcttttgactgagcagttttgaaacattctttctgtagaatctgcaagtggatatttagagcaatttgaggcctattgtggaaagggaaatttcttcaaataaaaactacccagaagctttatgagaaacttctttgtgatctgtgcattcatctcacagagtagaacctttcttttgattgagcacttttgaaacactcttttttttagaatctgcaagtggaagtttggagccttttgaggcctatagtggagaaggaaatatcttcacataaaaactatgcagaagcattctgagaaacttctttgtgatggctgcattcatgtcacagagttgaatgtctctgttgattgaacagttttgaaacactctttttgtagaatgtggaagtggatatttggagctcatttggtcctactgtggaaaaacaaatatcttcacataaaaactacacagaagcattctgagaaacttctttgtgatgggttcattcatctcacagagttgaatgtctctgttgattgagcagttttgaaacactctttttgtagaatctgcaagtggatatttggagctcattggggactactgtggaaaaacatatatcttcacgtaaaaactacacagaagatttctgagaaacacctttgtgaggtgtgcactgaagtccctgtattgaacctatcttttgattcagcagttttgaatctctctttttacagaggctgagactggatatttggagcgctttgaggcgtactgtggaaaatgaaatatcttcacacaaaaactacacagaaagcattcagagaaccttctttctgatgagtgcattcatcacagtgttgaacctttgttttgatttagctgttttgagactatctttccgtaggatctggaagtgaatatttgtagggctttaagatctgttttggagaaggagatatcttcatataaaaactacacagaagcattctgtgaaacttatttgcgatgggtgcattcaactcacattgttgaaggtgtctgttgattgagcagtttagaatctccctttttgtagaatctgcaagtgaatatttggggccctattttgccctatattggaaaaggaaatatcttcaaatagaaactacacagaagcattctgagaaactactctgtgatgcgtgcattcatgtcacagggtacaacctttctttggattgagcagttttgaaacactctttttgtagaatctgcaagtgcatatttagagtgatttgaggcttattgtggaaagggaaatttcttcaactaaaaactacccagaaccattctgagaaacttctttgtgatctgtgcattcatctcacagagttggatgtttctattgatacagcagttttgaaacactctttttttagaatctgtaaatggatatttggagtcttttcaggcctacagtgtagaaggaaatatcttcacataaaaactatgcagaagcattctgagaaacatctttgtgagttgtgcactgaagtgacagtgttgaacctatcttttgattcagcagttttgagtctctctttttacagaatctgagagtggatatttggagcactttgaggcgcactgtggaaaatgaaatatcttcacacaaaaactacacagaagcattctgtcaaccttatttgtgatgtgtgcattcagctcacattgttgaacgtatcttttgattcagcagttttgaatctttctttttacagaatctgcgagtggatatttggagcgctttgaggcgcactgtggaaaatggattatcttcacacaaaaactacacagaagcattcagagaaacttctttctgatgagagcattcatcacagagttgaacctttgttttgatttagcagttttgagacaatctttccgtagaatctggaagtaaatatttggagggctttgagttctgttttggagaaggagatatcttcatataaaaactatacagaagcattctgtgaaacttatttgtgatgtgtgcattcaaccaacaatgttgaaagtatctgttgattgagcagattagaatctctctttttgtagaatctgcaagtgaatatttggagccctatttcgccctatagtggaaaaggaaatatcttcaaatagaagctacacagaagcattctgagaaactactttgtgatgtgtgtattcatctcacagagtagaacctttcttttgattgagcagttttgaaacactctttttgtagaatctgcaagtggatatttagagcgatttgcggcctattgtggaaagggaaatatcttcaaataaaaactacccagaagcattctgagaaacttctttgtgatctgtgcattcatcgcacagagttgaatctttcttttgatacagcagttttgaaacactatttttttggaatctgcaagtggatatttggagccttttgaggcctatagtggagaaggaaatatcttcacataaaaactacgcagaagcattctgagaaacttctttgtgatgtgtgcattcatctcacagaactgaatgtctctgttgattgagcagttttgaaacactctttttgaagaatctgcaagtggatatttggagctcattggggcctactgtggaaaaacaaatatcttcacataagaactacacagaagatttctgaggaacatctttgtgaattgtgcacctaagtcacagtgttgaacctatcttttgattcagcagtttggaatctctctttttacagaatctgagagtggatatttggagcgctttgaggcatactgtggaaaatgaaatgtcttcacacaaaaactacacagaagcattcagagaaccttctttctgatgagtgcattcatcacagagttgaacctttgttttgatttagcagttttgacacaatctttccgtacaatctggaagtgaatatttggagggctttgagttctgttttggagaaggagatatcttcatataaaaactacacagaagcattctgtgaaacttatttgcgatgtgtgcattcaaatcacattgttgaaggtatctgttgattgagcagtttagaatctccctttttgcagaatctgcaagtgaatatttgttgccctattttgccctatattggaaaaggaaatatcttcaaatagaaactacacagaagcattttgagaaactactctgtgatgcgtgcattcatctcacatgttacaacctttctttggattgagcagttttgaaacactctttttgtagaatctgcaagtggatatttagagtgatttgaggcctattgtggaaagggaaatttcttcaactaaaaactacccagaagcattctgataaacttctttgtgatctgtgcattcatctcacagagttggatgtttctattgacatagcagttttgaaacactcttttttagaatctgtaaatggatatttggagccttttcaggcctacagtgtagaaggaaatatcttcacataaaaactatgcagaagcattttgagaaacttctttgtgagatatgcattcaactcacagagttgaacttatcttttcattgagaacttttgtatctcttttttggtagaatctgcaagtggatatttggagctctttgcaccctattgtggaaaaggaaatatcttcacataaaaactacacagaagctttctgagaaacacctttgtgaggtgtgcattgaagtcacagagttgaacctatcttttgattcagcagatttgaatctctctttttgcagaatctgtgagtggatatttggagcgctttgaggcctactgtggaaaatcaaaaatcttcacataaaaactacacagaagcattcagagaaacttctttctgatgagagcattcatcacagagttgaacctttgttttgatttagcagttttgagacaatctttccgtagaatctggaagtaaatatttggagggctttgagttctgttttggagaaggagatatcttcatataaaaactatacagaagcattctgcgaaacttatttgtgatgtgtgcattcaactcacagtgttgaacctatctgttgattgagcagtttagaatctctctttttgtagaatctgcaagtgaatatttggagccctatttcgccctatagtggaaaaggaaatatcttcaatagaaactacacagaagcattctgagaaactactttgtgatgtgtgcattcatctcacagagtagaacctttcttttgattgagcagttttgaaacattctttttgtagaatctgcaagtggatatttagagtgatttgaggcctatggtggaaagggaaatatcttcaaataaaaactacccagaagctttatgagaaacttctttgtgatctgtgcatccatctcacagagttgaatctttcttgtgatacagcagttttgtaacactatttttttagaatctacaagtggatatttggagcctttgaggcctatagtggggaaggaaatatcttcacataaaaactatgcagaagcattcggcgaaacttctttgtgatgggtgcattcatctcacagagttgaatgtctctgttgattgagcagttttgaaacactctttttatagaatctgcaagtggatatttggagttcattggggcctgctgtggaaaaacaaatatcttcacataaaaactacagagaagcattcttataaacatctttgtgagttgtgcactgaagtcacagtgttgaacctatcttttgattcagcagttttgaatctctctttttacagaatctcggagtggatatttggagcgctttgaggcgtactgtggaaaatgaaatatcttcacacaaaaactgcacagannnnnnnnnnnnnnnnnnnnnnnnnnnnnnnnnnnnnnnnnnnnnnnnnnnnnnnnnnnnnnnnnnnnnnnnnnnnnnnnnnnnnnnnnnnnnnnnnnnnatttcattgaacagattggaaacactctttctgtagaatctgcaatggacatttttcgcactttgaggcctatggtggaaaaggaaatatcttcacataaaaactagaccaaagcattctgacaaacttctttgtgatgtgtgcattcatctcacagatttgaaccttacttttcattgagcagtttgcaaacactctttttgtagaatctgcaagtggatatttggagtgctttgggggctgtggtggaaaaggaagtatcttcacataaaaactagacagatgcattctgacaaacttttttgtgatgtgtgcattcatctcacagagttgaaactttattttcattgagcagctttgaaactctctttttgtagaatctgcaagtggacatttggagcgcttttaggtctaaagtggaaaagaaaaaatatcttcaaatacaaagtagacagaagcattctgacaaacttcttcatgatgtgtgctttcatctcacagagttgaaacttacttttcattgtgcagttttgaaatacactttttgtagaagctgctactggacattaggactgctttgaggcctatggtggaaaagggaatatcttctcataaaaaccagataaaagcattctgacagactactttgtgatgtgtgcattcatctcacagagttgaaagtttcttttgattgagcagatttgaaacactctttttgtagaatctgcaagtggatatttttagcactttgaggcctatggtggaaaaggaaatatcttcacataaaaactagatcgaaacattttgacaaacttctttgtgatgtgtgcattcatctcacagagttgaaccttacttttcattgagcagttttgaaacactcttttggtagaatctgcaagtggacgtgtggagtgctttgagtcctatggggtaaagggaaatatcttcacataaaaactacacagaagcattctgagaaacatctttgtgatgtgtgtattcatctcacagagtttaaccttcctttgattgaggagttttgaaacactctttttgtagaatctgcaagtggatatttgtagcactttgagccctgttctggaaaatgaaataccttcacataaaatctacacagaagcattctcagaaacttctttgggatgtgtgcattcatctcacagatatgaagctttctttttattgagcagtttggaaaaactctttttctagtatgtgcaagcggatatttggagtcctttgtggcctatgttgcaagaggaaatatcttaacataaaaactacacagaatcattctgagaaacttccttttcatatgtgcattcatctcacatagttgaacctgtcttttgattgagcagtatggaaacactctttttgtagaaattgcaagaggatatttggagttttatgcctatcttggaaaaggaaatatgatcacataaaaaccacacagaagaattctgaaaaacttctttgttttgtgttcattcaactcacagagttgaacctatcttttgaatgagcagttttgaaactctctttttgtagactctacaagtggaaatttgagctctttgtggccgatggtggaaaaggaaatatcttcccataaaaactacacagaattattctgagaaccttctttgtgacgtgtgcattcatctcacagagttgaacctttcttttgattgagctgttttgaaacactctttttgtagaatctgcaagtggacatttggagtcctttgaagcctattgtggaaaaggaagtatcctcacataaaaactacacagaagcattctgaggaacttctttgtgatgtgtgcgttcaactcacagagttgaacctatctttttatagagcagttttgaaactgtttttgtagaatctgcaagtggatatttggagccctttgtggcttatagtggaaaaggaaatatcctcctataaaaactacaaagaatcactctgagaaacttctttgtgatgtgtgcattcatgtcacagagttgaacctttcttttgattcagcagttttgaaaatatctttttgtaggatctgtaaggggatatttggagggcttagaggcccatggtggaaaagggaatatcttcccataaaaactacacagaagcattctgagaaacttctttgtgatgtctgcattcaactcgtagagttgaacctatcttttgatagagcagttttggaattctctttttgtagaatctgaaaggggatatttggaggcctttgtggccgataatggaaaaggaaatatcttccaataaaaactacacggaagcattatgggaaacttccttttgatgtgtacatttatctcacagagttgaacatttcatttgattgatgagttttgaaacactctttttctagaaactgccattggatatttggatcgctttgaggcctattgtgcaaaaggaaatatcttcatataaaaactacacagaagcattctcagaaacttctttgtgatgtgtgcattcatctcagagttcaaactttcttttgaatgagcattttggaaacactctttttgtagaatctgcatgtggatacttggagcactttgagacctattgtggaaaaggaaatatcttcacataaaaactgaaaagaaaaattttgagaaacttctttgtgatacttgcattcatctcacattgttgaacatttcttttgatagagcacttttgaaactcccttttgtagaatctgcaagtggatatttggagccctttgcggcctatggtggaaaaggaaatatcttcacataaaaactacacagaaggattctgagaaacttctttgtgatgtgtgcattcaactcgcagagttgaacccatcttttgatagagcagttttcatactctctttttgtagaatctgcaagtggatatttggagcccttggcggcctatggtggaaaaggaaatatcttcatattaaaacttcaaagaagcattctgagaaacttctttgtgatgtgtgcattgattccacagagttgaacctttctttttattgagaagtttggaaacactcctttgtagggtctgcaagtgggtatttggagcgatttgagggctatggtggagaaggaaatatcttcacataaaaactacacagcatcattctcagaaactactttgtgatgtgtgcattcaagtaacagagttgaacctatcttttgatagagcagttttgaaattctctttctatagaatctgcaagtggagttttggagccctttgtggcctattgtggtaaaggaaagatcttcatataaaaactatacagaagcattctgagaaacttctttgtgatgtgtgcattcatctcacagaggtgaacctttcttttgatttagcaattttgaaacactcgtttgtatattctgcaagtggatatttggagcgctttgtggcctatggtggaaaaggaaatatcttcacataaaaattacactgaaactttctcagaaacttctttgtgatgtgtgcattccactcacagagttgaacctatcttttgatagagcagttttgaaactctctttttgtagaatcttcaagtgggtatttttagccctttgtggcctatgttggaaaaggaaatatcttcacatagaaactacccggaggaattctgagaaacttctttgtgatgtgtgcattaatctcacagagttgaaactttcttttgattgagcagttttgaaacactctttttctagaatctgcatgtggatatttggagagctttgaggcctgtggtggaaaaggaaatatcttcacataaaaactacaccaaagcattctgagaaacttctttgtgatgtgtccattcacctcgcagggttgaacctatcttttgatagagcagttttaaaccctctttttgtaggagatgcaagtggatatttggagcggtttcaggcctacggtggaaaaggaaatatcttcacataaaaactacacagaagaattctcagaaactttttgtgatgtgtgcattcaactcacagagttcaatgtaacttttcatagagcagttttgaaactctatttggtagaatctgcaagtggatatttggagccatttgtggcctatgggggaaaaggacatatcttcacataaaaactacacagaagcattctgagaaacttctttgtgatgtgtgcattcaactcaaagagttgaacctatcttttgacagagcagttttgaaactctctgtttttagaacctgcaagtggatatttggagacctttatggcctatggtggaaaaggaagtatcttcacataacaacttcacagaagcattctgagaaactactttgtgatgtgtgcattcaactcacagagttcaacctatcttttgatagagtagttttgaaactctctttttgtagaatctgcaagtgaatatttttagccctttgcagcctatggtggaaaaggaaatatcttcacataaatattaaacagaggcattctgagaaactactttgtgatgtgtgcattcatctcacacattagaacctttcttttgtttgagcagttttgaaacactctttttgtagtatctgcaagtggatatttggagggatttgtggcctaatgtggaaaaggaaatatcttcacaaaaaaactagacaaaaccattcttagaaacttctttttgatgtatgcattctaataacggaattgaacctttcttttgactaagctgttatgaaaccctatttctgtagaatctgcaattggatacttgcaacagtttacgacttctagtggaaaaggaaatgtctttacatacaaactagacagaagctttctgagaaactactttgtgatgtgtgcattcatctcacagatttgaaacttccttttaattgagcagttttcaaacactctttttgtagaatctgcaagtgcatatttggaacgctttgaggccaatggtggaaaaggaaatatcttcacataaaaactagacagaagcatgctgagaaacttctttgtgatgtgtgcattcaactcacagaattgaacctctcttatgattgagccgtttggaaactctctttttgtactatctacatgttgatatttggagcactttgatgcctatggtttgaaaaaaaatcttcacataaaaactagacagaagcattctgagaagcttcttcgtgatgtgtgcattcaactcacagagttgaacctttcttttgattgagcagtttggaaacagtctttctgtacaatctgtaagtggatcttttgtatgctttgaggcccatgatagaaaaggaaatatcttcatgaaagaactggacagaagcattctgagaaacttctttgtgatgtgagcagtcatctcacagggttgaacctttctttcaatttagcagttttgaaacacaccttttgtagattctgcaagtggatatttggagccctttaccatctatagtggaaaaggaaatatcatataaaaactagacagaagcattctgagaaacttgtttgtgatgtgtgcattcaactgagagacttgaacctctcttttgcttgaacagtttggaaactatctttttgtaggatctgcaagtggatatttggaaccatttgtggcctatggtgtaaaactaagtatctacacataaaaactcgacagaagcattctgagaaacttctttgtgatgtgtgaattcaactcacagagttgaactgctcttttgattgagcagtttggaaacagtctttttgaagtatctgtttgtggatatttggagctccttgaggcctacggtggaaaacgaaatatcttcacatgaaaacttgagagaaacattctgagaaacatctttgcgatatgtgcattcacctcacatggttaaacttcccttttgattgagcagtttggaaacactctttttgtagtatctgcaaatggatatttggagaggactgaggcctatagtggaaaaggaaatatcttcacataaaagctagacagaagcattctgagaaacttccttgtgatgaatgcactcaattcacagagttgaaactttcttttggttgagcagttttgtaacactctttttgtagaatctgcaaggggatatttggagcaatttgtggcctatagtggaaaagaaaatgtcttcacataaaaacgagacagaagtattctgagaaacttctttgtgatgtgtgcattcaattcaccgaactgaatatttctttagatacggcagttttaaaacactctttttgttgtatctgcaaatggatattatgagcagtttcaggcctatggtggaaaaggaaatgtcttcatataaatacaagaaagaagcattctgagaatcttctttgtgatgtgtgctttgaactcccaggcttcaacctttcttttgatagaacagttttgaaacacactttttgtataatctgctagtggatatttgaagcaatttggggcctatggtggaaaagggaatatcttcacctaaaaaatacacagaagtattctgagaaacttccttgtgatgtgtgcattcaactaacagagttgaaccttacttttgattcagcagttttgaaacactctttttgtagaatctgcaattggatatttggagcgcgttgtggcctatggtgggaaaagaaatatcttcacataaaatctagcagaaacattctgagaaacttctgtgtcatgtgtgcattcacttcacagagatgaaactttcttttgattgaacagttttgaaacactctttttgtagaatctgcaagtgcatatttggagtgctttgaggcctattgtggaaaatgatatatctttatctaaaaactacactgaagaattctgagaaagttttttgtgttgtgtgcatttaactcacagaattgaacttttcttttgattgcacagtttggaaactgtttttgtggtatctgcaaatgaatatttggagaggtttgaggactgttgtggaaaaggaaatatcttcacataaaaacaagacagaagtattctgagaaacttctttttgatgtgtgcattcatctcacagagttgaaactttcttttgattgtccattatgaaaccagctttttgtagaatctgcaagtgggtatttggagcgcattgagcactatggtgaaaaaggaagtaacttcacagagaaaaatatcagaagcattctgagaaacttctttgtgatgtgtgcattcatctctcagagttgaacctttcatttgatttagcagttttgaaacactctttttgtagaatctgcaagtggatatttggagcgctttgaggcctattgtggaaaaggatataaccttatctaaagactacacagaagaattttgtgaaagttctttgtgttgtgcgcatttaactcacagaattgaacttttcttttgattgcacagtttggaaactgtgtttttgtggtatctgcaaatgaatatttggagcggtttgaagactgttgtggaaaaggaaatatcttcacataaaaacaagacagaagcattctgagaaacttctttttgatgtgtgcattaatctcacagagttgaaactttcttttgatggaccagttttgaaacccgctttctgtagaatctgcaagtgggtatctggagcgcactgagcactatggtggaaaaggaagtaacttcacagaaaaacacaacagaagcattctaagaaacttctttgtgatgtgtgcattcatctctcagaatttaacatttcatttgatttagcagttttgaaacactctttttgtagaatctacaagtggatatttggaaggatttgagggtaccatggaaaaggaaatatcttcacataaaaacaacacagaagcattctcagaaacttcgttgttttgtgtgcattcatctcacagagttgaaacattccttttacagagcagttttgaaacacactttttgcagaatctgcaagtggatatttgcagccctttgagggctatggtggaaaaggaaatatgttcacataaaaactacacagaagcattctgagaaactgctttgtgatgtatgcattcaactcacagagttaaacctatgttttcatagaacagttttgaaactctttgtagaatctacaagtgattatttagaggcttttgtgacagatggtggaaaaggaaatatcttcctataaaaactacacagaagtattctgagaaacttccttgtgatgcatgcattcttctcacagagttgaacatttcatttgattgagcagtcttgaaacactctttttgtagaatctgcaagtggccatttggagccttttgcggccaatggtggaaaaggaaatatcttcacataaaaactgcacaaaagcattgtgggaatctgctttgtgatgtgtgcattcatctcacagagatgaacctctcttttcattgagtagtttggaaacactctttttgtagaatcggtaaggggatatatgaagcgttttgaggcctattgtggaaaatgaattttcttcacataaaaactacacagaagcattctgagaaacttctttgtgatgtgtgcattcatctcacagagttgaacctttcttttgattgagcagttgtgaagcattctttttgtagaaactgcaagtggatatttgtagtgctttgaggcctatggcagaaaagaaatatcttcacataaaaactacacagaagcattctgagaaacttctttgtgatgtgtacattcatctcatagagttgaacctatcttttgatagagcagttatgaaaccgtctttttgtagaatctgcaagtggatgtttggaaccctttgtggcctatggtggaaaaggaaatatcttcacataaaaactacacagaagcattctgagaatcttctgtgtggtgtgtgcattcaactcacagagttgaacctgtcatttgattgaacagttttgaatctctctttttgtagaatttgcaagtggatatttgcagcactttgtggcctatttttgaaaaggaaatatcttcacataaaaactacacagaagcattctgagaatcttccttgcgatgtgtacatgcatctcataaagttgaaactttcatttgattgagcagttttgaaacaccctttttgtagaatttgcaagtggatatttggatcacatcaaggtctattgtggaaaacgaaatatcttcacataaaaaatacacagaagcattctgagaaacttctttgtgatgtgtgcattcatctcacggagtttaaactttcttttgattgagcagttttgaaatactctttttatagaatctgaaagtggatatttgaagcgctttgatgcctatagtggaaaaggaattaccttcacatagaaactacacagaaggattctgagaaacctcattgtgatgtgtgctttcatctcagagagttgaacatgtcttttgattgagtcgttttgaaacagactttttgtagaacctgtaggtggatatttgtagctccttgaggcctattttggaaaaggaaatatcttcacatataaagtacacagaagaattctgagaaacttatttgtgatgagtgcattcttgtcatggagttcaacctttctgtggattgaccagtttggaaacactctttttgtagaatctgcatgtggatatttggagcgctttgaggcctgtggtggaaaaggaattatcttcacataaaaaccacacagaggaattctgagaaacttctttgtgatctgtgcattcttgtcacagagttgaacctttctttggattgaccagtttggaaacactctttttgtagaatctgcaagtggatatttggagcgctttgaggcgtatggtggaaaaggaaatatgttcacataaaaactacccagaagcattctgacaatctactttgtgatgtgtgcattcaactcacatagttgaacctaccttttgacagagcagctttgaaactctctttttgtagaatctgcaggtggatatttggagtcctttgaagcctggggtggaaaaaggaatatctacacagaaaaactacacagaagcattctgagaaactttttagtgatgtttgcattcatctcacagagttcaacctctcttttgattgagcagtttggaaacactctttgtagaatctgcaagtggatatttggagtgctttaaggcctattgttgaaaaggaaatatcttcacataaaaactacacagaaacattctgagaaacttctttgtgatctgtgcattcctgtcacagagttgaacctttctttggattgacctgtttggaaaccctcttcttgtagaatctgcaagtggatatatggagctctttggggcctatggtggaaaaggaaatatcttcacataaaaactacccagaagcattctgagaatctactttgtgatgtgtgcattcaactcacagagttgaaactaccttttgatagagcagctttcaaactctctttttgtagaatctccaagtggatatttggagccctttgaagcctatggtggaaaaaggaatatcttcacagaaaaactacacagaagcattctgagaaacttcttagtgatgtgtgcattcatctcacagagttcaacctctcttttgattgagcagttttgaaatactggttttgtagaatctgcaagtggatatttggagcacttttaggcctattgttgtaaaggaaatatcttcacataaaaactacacagaagcattctgagaaacttctttgtgatgtgtgcattcaactcacagagttgaacctatattttgatagagcacttttgaaactctctttttgtagcatctgcaagtggatatttggagccgttctcggcctaagttggaaaaggtattaacttcacataaaaactatacagaagcatggtactgctaccaaaacagagatatagatcaatggaacataacaaagccctcagaaataatgccgcatgtctacaactatctgattttcgacaaacctgagagaaacaagcaatggggacagtattttctatttaataaatggtactgggaaaaatggttagccatatgtagaaagctgaaactggatccctttcttacagcttatacaaaaattaattcaagatagattaaatacttaaacgttagacctaaaactatgaaaactctggaagaaaacctaggctttaccattcaggacataaccataggaaaagacttcatgtctaaagcaccaaaagcaaaggaaacaaagccaaaattgacatatgggatctaattaaactagatattctgcacagcaaaagaaactaccttcagggtgaacaggcagcctacaaaatgggagaaaattttcacaactactcatctgacagagggctaatatccagaatctacaataaactcaaacaaatttacaggaaaaaaacaaacaaccccatcaaaaagtgggtgaaggacatgaacagatacttctcaaaagaagacatttatacagccaaaaaacacatgaaaaaatgctcaccatcactggccatcagagaaatgcaaatcaaaaacacaatgagataccatctcacaccagttagaatggcgatcattaaaaagtcaggaaacaacaggtgctggagagcatgtggagaaataggaacacatttacactgttggtgggactgtaaactagttcaaccattgtggaagtccgtgtggcgattcctcagggatctaaaactagaaataccatttgatccggccatcccattactgggtatatacccaaaggactataaatcatgctgctataaagacacatgcacatgtatgtttattgtggcactgttcacaatagcaaagacttggaaccaactcaaatgtccaaaaataatagactggattaagaaaatgcggcacatatacaccatggaataataagcagccataaaaaaagatgagttcatgtcctttttagggacatggatgaaactggaaatcatcattctcagtaaactatcacaagaacaaaaaaccaaacactgcatattctcactcataggtgggaattgaacaatgagaacacatggacacaggaaggagaacatcacactctaggaacagttgtggggtggggggagggggtagagatagctttaggagatatacataatgctaaatgacgagtcaatgggtgctgcacaccagcatgccacatgcatacatatgtaactaacctgcacattgtgcacatgtaccctaaaacttaaggtataataataataataataataataataataaatacatagaagcattctgagaaacttctttgtgatgtgtgcattcatctcacagatttgaacttttctttttattgagcagtttggaaacactctttctgtagaatctgcaagtgtatatttggagtgctttgatccctatagtggaaaaagaaatatcttcacataaaaactacacagaagcattctgagaaacttctttgtgatgtgcacattcaactccgatagttgaacctatcgtttgatttagcagttttgaatctctctttttttagtatctccaagtggttatttgaagccttttgtggcccatttcagaaaaggaaatatcttcaaataaaaactacacagaagtactcttagaaacttctttgcgatatgtgcattgaactcacagaactgaaactatcttttgatagagcggttttgaaactttctttgtgtagaatctgcaagtgtatatttggagccctttgaggcctactgtggaaaaggaaatatcttcacataaacaatatacagaagcattctgagaaacttctttgagatgtgtgcattaatcttgcagaattgaacctatctttggattgagcactttttaatctatctttttgtagaatctacaagtatatatttgcagcactttgaggcctatggtggaaaagggaatatcttcacataaaaactacacagaagcactctgagaaacttctttgagatgtgggcattcatctcacagagttgaatatttcttttgattgaacagttttgaatctctctttttgtagaatgtgcatttggatatttggagccctttgcagcctattttggaaaaagaaatatcctcagagtaaaactacacagaagcactctgagaaacatctttgtgatgtgtacactcatgttacagagttgaaactttctttcgattgagcgcttttgaaactttttttatagaatctgcaagtggatgtttgaagcgctttgagacctgtggtggaaaaggaaatatcttcatataaaaactacacagaagcattctgagaaacttccttgtgatgtgtgcattcatctcacagtgttcaatctttcttttgattgagcagttttgaaacactctttttgtagaatctgtaagcggatatttagagctctttgagatctatgttggaaaagggaatatcttcacataaaaactacacagaagcattctgagaaacttctttgtgatgtgtcaatttgactcgtagagttgaatctatcttttgattgcacggttttgaatctctctttttgtagaatctgcaagtggatatttggatccgtttatggcctatttttgaaaaggaaatatcttcaaataaaaactacacggaagcattctgagaaacttctttgtgacgtgtgcattcatctcacagaattgaaactttcttttgattgagcagttctgaaacactctttttgaagaatctgcaagtagatatttgaagtgctttgaggcctattgtggaaaaggaaatatcttcgcataaaaactacacagaagcattctgagaaacttctttttgatgtgtgcattcatctcacagagttgaacttttattttgattgagctgttttgaaacactcttgtagcatctgcaagtggatattttgaacaatttgaggccaatggtggaaaaggaaatatctccacataaaaactacaaagaagcattctgagaaacttctttgtgatgtgtgcattcaactcacagagttgaatctttcttttgatagagcagttttgaaactctctttttgtagtatctgcaagtggatatttggagcccgttgtagtctatggtggaaaaggaaatatcttcacataaaaactacacagaagcattctgagaaactactttctgatgtgtgaattcatctcacagaggtgaaactttcttttgattgaccagttatgaaacactctttttatagaatctgaaagtggatatttgaagccctgtgaggcctatagtggaaagggaaatatgttctcagaaaactatacagaagcattctgagaaactgctttttgatgtgtgcattcatctcagagtgttgaaccttcgttttgattgagcagttttgaaaccctctttttgtagaatctgcaagtggatatttgaagcgctatgaggacgtatttcaaaataataagagctatctataacaaacccacagccaatatcatattgaatgggtaaaaactgaaagcattccctttgaaaactggcataagacagggatgccctctctcaccactcctattcaacatagtgttggaagttctggccagggcaattagacaggagaaggaaataaagggtattcaattaggaaaataggaggtcaaattgtccctgtttgcagacgacatgattgtatatctagaaaaccccattgtctcagcccaaaatctttttaagctgataaccaacttcagcaaagtctcaggatacaaaatcaatgtacaaaaatcacaagcattcttatacaccaataacagacaaacagagagccaaatcatgagtgatctcccattcacaattgcttcaaagggaataaaatacctaggaatccaacttacaagggatgtgaaggacctcttcaaggagaactacaaaccactgctcaaggaaataaaagaggatacaaacaactggaagaatattccatgctcatgggtaggaagaatcaatatcttgaaaatggccatactgcccaaggtaatttacagattcaatgccatccccatcaagctatcaatcactttcttcatagaattggaaaaaactactttaaagtttgtgtggaatcaaaaaagagcctgcatcatcaagtcaatcctaagccaaaagaacaaagcaggaggcatcacactacctgacttcaaactatactgcaaggctacagtaaccaaaacagcatggtactggtaccaaaacagagatatagatcaatggaacagaacagagccctgaggaataatgccacatatctacaactctctgatctttgacaaacctgagaaaaacaagcaatggggaaaggattccctatttaataaatgctgctgggaaaactggctagccatatgtagaaagctgaaactggatcccttccttacaccttattcaaaaatcaattcaagatggattaaacacttacacgttagacctaatactataaaaaccctagaagaaaacctaggcattaccattcacgacataggcatgggcaaggacttcttgtctaaaacaccaaaagcagtggcaacaaaacccaaaattgacaaatgggatctaattaaactaaagagcttctacacagcaaaagaaactgccatcagaatgaacaggcaacttacaaaatgagggaaaattttcacaacctactcatctgacaaaagactagtatccagaatctacaatgaactcaaacaaatgtacatgaaaaaaacaaacaaccccatcaaaaagtgggtaaaggacatgaacagacacttctcaaaagaagacgtttatgtagccaaaaaacacatgaaaaaatgctcaccatcactggccatcagagaaatgcaaatcaaaaccacaatgagataccatctcacaccagttagaatggcaatcattaaaaagtcaggaaacaacaggtgctggagaggatgtggagaaataggaatacttttacactgttggtgggactgtaaactggttcaaccattgtggaagtccgtgtggcgattcctcagggatctagaactagaaatatcatttgacccagccatcccattactgggtatacacccaaaggactatatatcatgctgctataaagacacatgcacacgtatgtttattgcggcagtattcacaatagcaaagacttggaaccaacccagatgtccaacaatgatagactggattaagaaaatgtggcacatatacaccatggaatactatgcagccataaaaaatgatgagttcatgtcctttgtagggacatggatgaaattggaaattgtctttctcagtaaactatcacaagaacaaaaaaccaaacaccgcatattctcactcataggtgggaattgaacaatgagaacacatggacacaggaaggggaacatcacactctggggcccgttgtggggtgaggggagagggataacattgggagatatacctaatgctagatgacgagttagtgggtgcagcagaccagcatggcacatgtatccatatgtaactaacctgcactttgtgcgcatgtaccctaaaacttaaagtataataataaaaaataaataaataaataaatgctaaaatctcttcaaaaaaaaaaaactggacagaagcattctgagaaacttctttgtgatgtgtgtgttcatctcaccgagttcaaactttcttttgattgaccagttttgaaatactctttttgtagaatctgcaagtggatatttggggcgatttgaggcctatgttggaaaaggaaatatcttcatatgaaaactagacagaagcattctgagaaacttcttagttatgtgtgtattcatctcagagaattgaaccacacttttgattgagcagtttggaaacagtctttttgtcgtatctgcatgtggatatttggagcactttgatgcctatggtggaaaaggaaataccttaacataaaaattagacagaagcattctgagaaacttctttgtgatgtttgcattcatctcacagagttcaacctttcctttgattgaacagttttgaaacactctttttgtaaaatctgctagtggatatttggaacgctgtgaggcctatggtggaaaaaaacgtatcttcacataagaactgtgaagcaggtttcctaaaaacagccttgtgatgtgtgcattcatctcgcagaggtaagcatttattttctctgatcagtctgtaaactctgttcttgtacaatctgaaaaagagtatttttgctcactttgaggcctatgttgacaaaggaaatatcttcacatacaaagtataaggaaagtttctgagatacttctttgtgatatgtgcattcatctcacagatttgaacctctcttttgcttcagcagtttggaaacagtatttttgcagaatctgcaaacggatatttgtgagcactttgagacctatgcagaaaaagaaataacttcacagaaaactataaagaaggtttctgagaaactgttttgtgatgtctgcgttcatttcacagaggtaaacgattttttctttgatcatatgggaaactctgttgttttagaatctgctaagggatatttgtgagtgcatagagccctatggtgaaaaaggaattgtcttcacataaaaactagacagaagcatcctgagaaacttcttggtgatgtgtgcattcatctcatagaattgaaactttcttttgattgagcagtttggaaacgtctttttgtggaatctgtaaagggatatttctgagcactttgaggcctatggtgaaagagaaaatatcttcacataaaaactagactaaagaattctgacaaactgctttgtgatgtatgcattcatctcacagagttcaacaattcttttgattgagcagttgggaaaccatctttttgtagaatctgcaaaggtatatttgtgagtgctttgaggtctgtggttaaaaggaaatatcttcacataaaaactataaagaaggtttgtgagaaacttctttgtgatgtgcacattcatctcacagggttgaaccattcctttcattcagcagtttggaaacagtctttttttaggatctgcaaagggatatttttgagcactttgaggcccatggtgaaaaaggaaacacactcacataaaaacaagatagaaatttctgagaaaaatctttttgatatatgcattcatcccacagagatgaaattttcttttgatgagcagtttgaaaacagtattttgtagaatttccaaagtgttattagttagcgctttctgtcctgtgttgaaaaaggaattatctttacataaatactagacagaatatttctgagaaactgctttgtgatgtgtgctttcatcccaccaaggtaactatttcccttcattgagcagattggaaattctgttcttgtaaaatctgcaaaaggatatttgtcagtgctttgaggcttatggtgaaaaaggaattatcttcacgtaaaaactagacagaagctttctgtgaaacatcttggagatgcgagaattcatctcacagagttgaaacattcttttgattgagcagtttgtaaacagtattttggtaggtagaatctgcaaagggatatttgtgatgctttgaagcctatggtggaaaaggaaatattttcacatgaaaactagagagaagctttctgagaaacctccttgtgatgtgtgcattcatctcacagatttgaacctctctttggattgagcaatttggatacagtatttttgtagaatctgtaaaggtgtatttttgagagctatgagacctatgatgaaataggaaatatcttcacaaaaaaactagacagaagctttccgagaaacttctttgtgatgtgtgcattcatcccatagagttcaaccattcttttgattgaacagtttggaaacagtctttttgtagaatctgcaaagggatatttatgagtgctttaagacctgtggtgaaaaaggaaatatattcacataaaaagtataaacaaggtttctcagaaacagctttgtgatgtatgcattcgtctcacagaggtaaatgtttcttttctgtggtcagtctggaaactgctcttgaagagtctgcaaagggatatttgtgagtgctttgaggcctatggtgaaaaaggaaatatcttcacataaaaattagagagaggctttctgagaaacctctttgtgatgtaggcattcatctcacaaagatgaaacttacttttgattgagcagtatggaaatggtctgtttgtggaatctgcaaagggatatttatgagcactttgaggccaatggtgaaaaaggaaatatatttatataaaatgtataaagaaggtttcttagaaacagctttgtgatatgtgcattgatctcaaagaagtaaacgtttattttctctgatcagtcaggaatctctgtttttgtagaatctgcaaagggatatttgtgagtgctttgaggcctatggtgaaacaggaaatatcttcacttaaaaactagacagaagctttcttagtggcttctttgtgatgtgtgcaatcatctcacagagttgaaccattcttttgattgagcagtctggaaacagtctttttgtagaatctgcaaggaatatttgtcaggactttgagtactatggtgaaaaaggaaatatcttcacataaaaaatggacaaaagatttctgagaaacctctttgtaatgtgtgcatccatctcacagagtttaaacattttttttgattcagcaggtgggaagcagtctttttgcagaatctgcaaagggatattgctgagcactttgaggcctatggtgaaaaaggaaatatcttcacataaaaactataaagaaggtttctgagaaacttctttgtgatgtatgcattcatctcatggagttgaactatttttttaattgagcagtttggaaacaatcttttttgtagaatctgcaaagggatatttttgagtgctttgagtcctagggagaaaaaagaaatatcgtcacataaaaagtataaagaaggttctgaaaaacagttttgtgatgtgtgcattcatctcacagagaaaaaggtttgttttctttgatcagtctggaaattctgttcttgtagaatctgctaagggatatttgtgagcagatggaggcctatggtgaaaaaggaaatgtcttcatataaaaattagacagaagcctcctgcgaaacttctcagtgatgtgtgcattcaactcacaaaattgaaactttcttttcattgagccattcggaaacagtctttttgtagaacctgcaaatggatatttggagcattttgaggcttatggtgaaaaaggaaatatattcacataaaaaccagactgaaggtttctgagaaacttctttgagatgtgtgaattcatctcaaaaagttcaataattctttttattgagcagtttggaaacagtgtttttgtagaatctgcaaagagatatttgtgagggctttgaggcctatagtgaaaaaggaaatatcttcacagaaaaactataaagaaggtttctgagaaacttctttgtgatgtgtgcattcatctcacacagttcaacctttcttttggttgagtggtttggaaatagtctttttaaatattcttcaactggatatttgtgagcactttgaggctcgtggtgaaaaaggaaacattcacatgaaaacttaatagaagctttctgagaaacttatttttgacacgtgcattcatctcacagaggtaaacctttcttttgatgagcagtgtggaaacaatctttttgtagaatctgcaaagcgacaattttgagcgctttgcatcctgtggtgaaaaaggagataccttcacataaaaactagacagaatgtttctcagaaactgctttgtgatatgtgcattcatctccaagatgtgtctgtttcttttcattgagaagattggaaactcttctcttgtaaaatctgcaaagggatatttgtgagccctttgaggcgtatggtgaaaaaggaaatatcttcacataaaaacgacacagaagctttctgagaaacatcctggtgatgtgagcattcacctcacagagatgaaacattcttttgattgagcaatgtgtaaagagtcttcttgtagaatctgcaaagggatatttgtgaacgcttggaggcctatggtgaaaaataaaatatcttcatgtaaaaactagagagaagctttctgagaaacctctttgtggtgtgaatacatctcacagagttgaacctttcttttgattgagcaatttggaaaaagtatttttgtagaatctctaaagggatatttgtgagcactttgaggcctatggtgaaaaagcaagtatcttcacataaaaactagacagaagcattctgagaaacttcttcatgatgtgtgcattaatcacacagagttaaacctttgttttgattgagccatttggaaacagtctttttgtagaatctgcaaatggatatttggagcactttgaagcctatggtgtaaaaggaaatatattcacataaaaaccagactgaaggattctgagaaacttctttgagctgtgtgcattcatctcacagtgttcaataattctttttattgagcggtttggaaacagtctttttgtagaatctgcaaaggggtatttgtgagggctttgaggcctatgttgaaaaagaaaatatcttcacagaaaaaccataaagaacgtttctgagaaacttctttgtggtgtgtgcattcatctcacagagttgaaacattctttggattgagcagtttacaaacagtcttcttgtagaatctgcagaaggatatttgtagcgctttcaggcctatggtgaataaggaaatatcatcacataaaaactagaccaaagttttctgagaaatttttgtgatgtgtgcatttatctcatagagtttaacatttgttttgattgagcagtttggaaagtctttttgtacaatctgcagagggatatttaggagtgtgttgaggcctatagtgaaaaaggaaatatcttcacataaaaactagaaagaagcattctgagaagctgctttaagatatgtgtattcatctcacagaggtaaacgtttcttttcattgagcagttcataaactctgttattctagagtctgaaaagggatatttttgagtgctttgagacccacgttgaaaaaggaactatctttacataaaaactaatgagaagcttgctgagaaactactttctgatgtgtgcattcatctaacagagttgaaactttcttttgattgagcagtttggaaacagtctttttgtagattctgcaaaggtatatttgggagtgcattgaggcctatgttcaaaaaggaaatctcttcacataaaaacgagaaggaagttttcttggaaacttctttgtgatgtgcacattcgtctcacaggattgaaccattccgtttattgagcagtttggaaacagtctttttgtagaatctgcaaagggatatctgggagtgcgttgaggcatatggtgaaaaaggaaatatcttcacattaaaagtagaaagaagttttctgagtaactcctttgtgacgtgtgcattcatcacacacaagtaaaagtttcttcccattgaactgttagtttttatgtgaagatatttccgttttcaccatagacctcaaaccgcctacatatatccctttgcagattctacgaaaagactgtttccaaactgctcaatcaaagaaagcttccactatgcgagatgaatgcacacatcacagagaagtttctcagaaattttctgtctagtttttatttgttaatacacccattttcaccataggcctgaaactgctcataaataaccctttgcagattctaaaaaaagactgtttccaaactactcaatcaaaagaaaggctcacctttgtgaggtgaatgcacacatcacaaagaagtttctcagaaagcttctgtctagtttttatttgaagatgtttcctttttcaatataggcctcaaagtgctcacaaatgtccctttacagattttacaaaaagactcttcccaaactgttcaactgaaacaaagcttcaactctttgagatgaatgcacacatcacaaagaagtttctcagaaagcttccatccagtttttatgtgaagctatttcctttttcaccataagtcttaaagcattcaaattatcactttgcatattctacaaaaagacattttccaacctgctctaactaaagaaaggttcaactctgtgagaagaatgcacacaccaaaaataagtttctcacaatgcttctgtctagtttttatgtgaagacatttccttttttgccatagaccaaaaagggatctcaaatatccctttgtacattctacaaaggactgtttccaaactgcttaatccaaagacaggttcaactctttgggatgaatgcacacatcacaacgaagtttctcagaaacttctgtctagtttttgtgtgaagatatttcttttttcaccataggcttcaaagggctcacaaatatcgcaaagcagattctacaaaaagactatccaaactggtcaatgaaaagaacacttcaaatctgtgagatgaatgagcacatctcaaagaattttctcagaaaccttctgtctagtttttatgtgaagatatttccgtttccacgatagacctgaaactgcctaaatatatctctttgcagattctacaaaaagactgtttccaagctgctcaatcaaagaaagtttttactctgtgtgatgaatgcacacatcacagagaagtttctcagaaagtttctgtttagtttttatttgtcgatactccctttttcaccataggcctcaaacttctcataaataaccctttgcagattctactaaaggactgtttccaaactgctcaatcaaatgaaagttcggctgtgtgagatgaatgcacacatcacaaagaagtttctcagaacgtttctgtctagcttttatgtgaagatacttctttttcaccataatcctcaaagcgttcacaaattttcctttgcagattctacaaaaagactgtttccaaactgctcaatcaaaagaaaggttcaattctgtgtgatgaatgcacacgtcacaaagaagtttctcagaagggttctatctagattttatttgtggagatttcctttttcacaataggcctcaaaaagctcacaaatatccctttgcatattctacaaaaagactgtttctaaactgctcaatgaaagaaaattcaactctgtgagatgaatgcatgcatcacaaagtgatttctcagaatgcttctgtctagtgtttatatgaagatatttcctttttcaccacatgcctcacactgctcaaaaacatccctttgcagattctccaaaaagactgtttccaaactgctcaatcaaaagaaagattcaactgtttgagatgcatgcacccattacaaagaagtttcccagaaaacatgagtctagtttttatgtgaagatatttcctttttcaccataagactcaaacaattcacaaatatcactttgcaggttctacgaaaagactgtttccaaactgctcaatcaaaagaaagtttcaaccctgtgagatgaatgcacacatcacaaagaagtttttcagaaagatgctgtctacattttattttttgatatttcctttttcaccaaaggactcaaatcgctgaaacacatctgtttgcagattctacaaaaagactgtttccaaactgcccaatcaaaagaaaggttcaactctgtgagatgaatgcacacatcacaaagcagtttcatagatacctcttattattttgagatacgtcctatcaatacctaacttattgacagtttttagcatgaagtgttgttgaattttgtcaaaggccttttctgcacctattgagataatcatgtggtttttgtgtttggttctgtgtatatgctggattacatttattgatttgtgtatattgaaccagccttgcatcccagggatgaagcccacttgatcattgtggataagctttttgatgtgctgctggattcagtttgccagtattttattgaggatttttgcatcaatgatcttcaaggatattggtctaaaattctcttttttggttgtctctctgcccggctttcgtatcaggatgatgctggcctcataaaatgaattagggaggattccctctttttctattgattggaatagtttcagaaggaatggtaccagttcctccttgtacctctggtagaattcggctgtgaatgcatctgatcctggactctttttgcttggtaagctattgattattgccacaatttcagagcctgttattggtctattcatagattcaacttctttctggtttagtcttgggagggtgtaggtgtcgaggaatttatccatttattctagattttctagtttattttcctagaggtgtttgtagtattctctcatggtagtttgaatttctgtgggatcagtggtaatatcccctttatcattttttattgagtctatttgattcttctctcttttcttgtttatatgtcttgctagcggtctgtcaattttgttgttcctttcaaaaaaccagctcctggattcattaattttttgaagggttttttgtgtctctatttccttcagttctgctctgattttagctatttcttgccttctgctagcttttgaatgtgtttgctcttgcttttctagttcttttaattatgatgttagggtgtcaattttggatctttcctgctttcccttgtgggcatttatgctataaatttccctctacaaactgctttgaatgtgtcccagagattctggtttgttgtgtctttgttctctttggttttatgcagctataaagacacatgcacacgtatgtttattgtggcactattcacaatagcaaagacttggaagcaaccaaatgtccaacaattatagtctggattaagaaaatgtggcacatatacactatggaatactatgcagccataaaaaatgatgagttcatgtcctttgtagggacatggatgaaattggaaatcatcattctcagtaaactattgtggggacaaaaaaccaaacaccacatgttctcactcataggtgggaattgaacaatgagaacacatggacacaggaaggggaacatcacactgcggggactgttgtggggtgaggggagggggaagggatagcattatgtgacatacctaattctaagtgacgagttaaagggtgcagcacaccagcatggcacatgtatacatatgtaactaacctgcacattgtgcacatgtacccttaaacttaaagtataataataataaaataaaataaaataaaaagaaagcacacatcataaagaagtttctcagaaagtttctttcttgttttcatgtgaagatatttcctttttcaccatagtccacaaagtgcatgaaatatcttttgcagattgtacaaaaagactttttccaaactgctcaatcaaaagaaaggttcaactctgtgagatgaaagcacaaatcacaaagaagttactcagaatgcttccatctagtttttaagtgaaggaatttcctgttacaccatgggcctcaaagggctcacaaatatccttttgcagattctacaaaaagactgttacagaactgctcaatgaaaagtaagtttcaactctgtgagatgaatgcacacctaaaaaagaagtttctcagaatgcttctgtctagtttttatatgcagatatttctttttcatcataggcctcaaacccctcagaaatatccctttgcagattgtagataaagactgtttcttaactgctccatcaaaagaatggttcaactctgtgagatgaaagcacacatcacaaagaagtttctcagaaatcttctgtctagtttttatgtgaagatatttcccttctaatgataggcctcaaagcaatccaaatctctatttgcagattctacaaaagactatttccaaactgctcaatcaaaagaaattttcaactctgtgagatgaaagcacacatcacaaagaagttcttcagaaagtttctcactagattttatgtgaagttatttaatttttcaccacaagccacaaagcactccaaatatccatttgcagatacttcaaaaagagtttctccaaactgctcaatcaaaagaaagtttcaactctgtgagatgaatgcaaacatcacaaagaagtttctcagaatgcttctgtctagttttactgtgaagatatttcccatttcaccatgggcctcagtgggctcacatatgcttttgcaaattctacaaaaagactgcttccgaatttctcaatgaaaagaatggttttccaacttcgttctattctccccgtgactttcaggtacaccaatcagacgtagatttggacgtttcacatagtcccatatttcttggaggtcttgctcgtttctttttattcttttttctctaaacttcccttctcgcttcatttcattcatttcatcttccatcactgataccctttcttccagttgattgaatcagttcctgaggcttctgcattcttcacgtagttctcaatccttggttttcagctccatcagctcctttaagcacttctctgtattggttattctagttatacattcttccaaatttttttcaatgttttcaacttctttgcctttggtttggatgtcctcccgtagctcggagtaattttatcgtctgaagccttcttctctcagctcgtcaaagtcattctctgtccagctttgttccattgctggtgaggaactgtgttcctttggaggaggagaggcgctctgctttttagagtttccagtttttctgctctgttttttccccatctttgtggtattatctacttttggtctttgatgatggtgatgtacagatgggtttttggtatggatgtcctttctgtttgttagttttccttctaacagacaggaccctcagctgcaggtctgttggagtacccggccatgtgaggtgtcagtttgcccctgctggggggtgcctcccaggtaagctgctccagggtcaggggtcagggacccacttgaggaggcagtctgccagttctcagatctccagctgtgtgctgggagaaccactgctctcttcaaagctgtcagacagggacatttaagtctgcagaggttactgctgtctttttgtttgtctgtgccctgcccccagaggtggagcctacagagtcaggcaggcctccttgacctgtggtgggttccacagagttcgagcttttcgtctgctttgtttaactaagcaagcctgggcaatggcaggcggccctcccccagcctcactgccgctttaccgtttgatctcagactgctgtgctagcaatcagcaagactccgtgggcgtaggatcctccaatccaggtgcaggatataatctcatggtgtgccattttttaagaccatcagaaaagcgcagtatgcgggtgggagtgacccgattttacaggtgccatctgtcacccctttctttgactaggaaagggaactccctgaccccttgtgcttcctgagtgaggcaatgcctcgccctgcttcagctcgtgcatggtgcacgcacccactgacctgcacacagtctggcactccctagtgagatgaacccggtacctcagatggaaatgcagaaatcacctgtcttccgcgttgctcaggctgggagctgtagactggagcagtttctattcggccatcttggcttctcctcccccactctgcaggatattatccaggagaaattccccaatctagcatggcaggccaacattcagattcaggaaatacagagaatgccacaaagatactcctcgagaagagcaactccaagacacataattgtcagattcaccaaagttgaaatgaaggaataaatgttaagagcagccagggagaaagatcaggttaccctcaaagggaagcccatcagactaacagcagatctctcagcagaaactctacaagccagaagatagtgggggccaatattcaacattcttaaagaaaagaattttcaacccagaatttcatatccagccaaactaagcttcataagtgaaggagaaataaaataatttacagacaagcaaatgctgagagattttgtcaccaccaggccggccctaaaagagctcctgaaggaactgctaaacatggaaaggaacaaccggtaccagccactgcaaaatcatgccaaaatgtaaagaccatcaagattaggaagaaactgcatcaactaacgagcaaaataaccagctaatatcataatgacaggttcaaattcacacataacaatattaactttaaatgtaaatggactaaatgctccaattaaaagacacagactggaaaattggataaagagtcaagacccatcagagtgctgtattcaggaaacccatctcatatgcagagacacacataggctcaaaataaaaggatggaggaagatctaccaagcaaatggaaaacaaaaaaaaggcaggggttgcaatcctagtcgctgataaaacagactttaaactaacaaagatcaaaagagacaaagaaggccattacataatggtaaagggatcaattcaacaagaagagctaactatcctaaatatatatgcacccaatacaggggcacccagattcataaagcaagtcgtgagtgacctacaaagagacttagactcccacacattaataatgggagactttaacaccccacagtcaacattagacagatcaatgagacagaaagttaacaatgatacccaggaattgaactcagctctgcaccaagcagacctaatagacatctacagaactgtccaccccaaatcaacagaatatacatttttttcagcaccacaccacacttattccaaaattgaccacatacttggaagtaaagctctcctcagcaaatgtaaaagaacagaaattataacaaactatctctcagaccacagtgcaatcaaactagaactcaggattaagaatctcactcaaaaccgctcaacaacatggaaactaaacaacgtgctcctgaatgactactgggtacataacgaaatgaaggcagaaataaagatgttctttgaaaccaacgagaacaaagacacaacataccagaatctctgggatgcattcaaagcagtgtgtacagggaaatttatagcactaaatgcccacaagagaaatcaggaaagatccaaaatggacaccttaatatcacagttaaaagaactagaaaagcaagagcaaacacattcaaaagctagcagaaggcaagaaataattaaatcagagcagaactgaaggaaatagagacacaaaaaacccttcaaaaaattaatgaatccaggagctggttttttgaaaggatcaagaaaattgatagaccgctagcaggactaataaagaaaaaaagagagaagaatcaaatagacgcaatataaaatgataaaggggatatcaccaccgatcccacagaaatacaaactaccatcagagaatactacaaacaactgtatgcaaataaactagaaaatctagaagaaatggatgaattcctcgacacctacaccctcccaagactaaaacagaaagaagttgaatctctgaatagaccaatgacatgagctgaaatttggcaataatcaatagcttaccaaccaaaaagagtccaggaccagatggattcacagccgaatactaccagaggtacaaggaggaactggtaccattccttctgaaactattccaatcaatagaaaaagagggaatcctccctaattcattttatgaggccagcatcatcctgataccaaagccgggcagagacacaacaacaaaaaaagaattttagaccaatatccttgatgaacattgatgaaaaaatcctcaataaaatactggcaacccgaatccagcagcacatcaaacagcttatccaccatgatcaagtgggcttaatccctgggatgcaaggctggttcaatatatgcaaatcaataaatgtaatccagcatataaacagaaccaaagaccaaaaccacatgatcatctcaatagatgccgaaaaggcctttgacaaaattcaaaaacccttcatgctaaaaactctcaataaattaggtattgatgggatgtatttcaaaataataagagctatctatgacaaacccacagccaatatcatactgaatgggcaaaaactggaagcattccctttgaaaactggcacaagagagggatgcactatctcaccactcttattcaacatagtgttggaagttctggccagggcaattaggcaggagaaggaaataaagggtattcaattaggaaaagaggaagtcaaattgtccctgtttgcagacgacatgattgtatatctagaaaaccccattgtctcagcccaaaatctccttaagctgataagcaacttcagtaaagtctcaggatacaaaatcaatgtacaaattcacaagcattcttatggaccaacaacagacaaacagagagccaaatcatgagtgaactgccattcacaattgcttcaaagagaataaaatacctaggaatccaacttacaaggtatgtgaaagacctcttcaaggagaactacaaaccactgctcaaggaaataaaagaggatacaaacaaatggaagaatattccatgctcatgggtaggatgaattaatatcttgaaaatggccatactgcccaaggtaatttacagattcaatgccatccccatcaagctaccaatcactttcttcacagaattggaaaaaaactactttaaagttcgtgtggaataaaaaaagagcccgcatttccaaatcaatcctaagccaaaagaacaaagctggaggcatcacactacctgtcttcaaactatactacaaggctacagtaaccaaaacagcatggtactggtaacaaaacagagatatagaccaatggaacagaacagagccctcagaaataacgccacatatctacaactatctgaaatttgacaaacctgagaaaaacaagcaatggggaaaggattccctgtttaataaatggtgctgggaaaactggctagccatatgtagaaagctgaaactgcttcccttccttacaccttattcaaaaatcaattcaagatggcttaaagacttaaacgttagacctaaaaccataaaaaccctagaagaaaacctaggctttaccattcaggacataagcatgggcaaggacttcatgtctaaaacaccaaaagcaatggcaacaaaagccaaaattgacatatgggatctaattaacctaaagagcttctgcacagcaaacgaaactaccatcagagtgatcaggcaacctacaaaatgggagaaaattttcgcaacctactcatctgacaaaggattaatatccagaatctatgatgaactcaaacaaatttacaagaaaaaaacaaacaaccccatcaaaaagtggacgaaagacatgaacaaacacttctcaaaagaagacgtttatgcagccaaaaaacacatgaaaaaatgctcatcatcactggccatcagagaaatgcaaatcaaaaccacaatgagataccatctcacaccagttagaatggcaatcattaaaaagtcaggaaacaacaggtgctggagaggatgtggagaaataggaatacttttacactgttggtgggactgtaaactagttcaaccgttgtggaagtcagtgtggcgattcctcagggatctagaactagaaacaccatttgacccagccatcccattactgggtatatacccaaaggactataaatcatgctgctataaagacacatgcacatgtatgtttattgtggcactattcacaatagcaaagacttggaaccaacccagatgtccaacaatgatagactggattaagaaaatgtggcacatatacaccatggaatactatgcagccataaaaaatgatgagttcatgtcctttgtagggacatggatgaaattggaaatcatcattctcagtaaactatcgcaagaacaaaaaaccaaacaccgcatattctcactcataggtgggaattgaacaatgagaagacatggacacaggaaggggaacgtctcactctgggccctgttgtggggtggggggaaggggagggattgcattgggagatatacctaatgctagatgacgagttagtgggtgcagcgcaccagcatggcacatgtatacatatgtaagtaacctgaacattgtgcacttgtaccctaaaatgtaaagtataataataataataaaaaagaaaagaatggttcaattctgggagaagaatgcatacatgaaaaagaagtttctcagaatgcctctttctactttttatgttaagatatttgtttttcaccttaggcctcaaagtgctcagaaatatccctttgcagattgtagaaaaagatggtttccaaactgctcaatgaaaacaagggttcaacactgtgacatgaatatgcacatcacaaagaagtttttcagaaagcttccgtttagtttttaagtgaagataattcctttttcactataggtctcaaagtgctccaaatatccttttgcagaatctacaaaaaaagagtttccaaactgttcaattaaaagatagattcaaatctgtcagaagaaagcacacatcacaaagaagtttctcataatgcttctgtctactttttttgtgaagatatttcctatatcaccataggcctcaaaggtctcacaaatatccctttgcagactgtacaaaaacacagttttcaaactgctccatgaaaagaaaggttcagctctgtgagatgaatgcacacataataaattactttctcataatgcttcagtctagtttttatgtgaagatatttctttttcaccataggcatcaaaccgttcagaaatatccctttgtagattgtacaaaaagactgtttccaaactgctcaatcaaaagaaaggttcaaacatgcgagatgagtgtacacataacaaagaagtttctcagaaatcttctgtcttgtttttatgtgaagatatttcctttctcaacataggcctcaaagcaatccaaatatccatttgcagattctacaaaaagactgtttcccaactgatcaatcaaaacaaatttttagctttctgagatgaaagcacacatcacaaaaaagttactcagatttcttctctttagtttgtgtgtgaaaatatttcctctttcatctgacgccataaagggctcacaaatatccctttgaagtttctatgaaaacactgtttccaaactgcttaatcaaaggaaaggttcaactctgtgagatgaatggacacatcacaaagaaatttctcggactgactctgtctagtttttatgtgaagatattactctttcaccataggcctcaaatggatcagaattatccctttgcagattgtacaataagcctctttccaacctgctcaatcaaaaaaaaaggttcaactctgtgagatgaatgcacacatcacaaggaagtttctcagaaagcttctgtttagtttttatgtgaagatatttctttttcaccatgggcctcaaagtgctccaaatatccatctgcagattctagaaaaagagtgtttccatactcctcaatcaaaagaaagtttcaattctgtgagatgaaagcacacatcacaaacaagtttcttagaaagcttctgtctagtttttatgtgaagatatttcacatttcaccgtagtactcaatgggctcagaaatatccctatgcagattctacaaaaggactgtttccaaactgctcaatccaaataaagtttcaactctgtgagattaatgcacacatcataaagaagtttctcagaatgcttctgtctagtttatatgtgaagaaaattcctacttcaccataggcaataaagggctcacaaatattttttgcagattctacaaaaagactgtatccaaattgctcaatcaaaagaaagaaagtttcaactctgttagattaatggacacataaaaaagtagtttatcagaaaacttctgtttagtttttatgtgaagatatttcctttgtcaccaatgacctcaaagcactcctaatatccatttacagatttcacaaaaagagtttttccaaattgctgaatcaaaagaaagatttaactctgtgagatgaaagcacacatctcaaagaagtttctcagaaagctttggtctggttttcatgtgaagatatttccagtttcaccataggcctcaaagggctaagaaatatccctttgcaggttctaaaagaggaccatttccatactgctcaatcaaaagaaaggttaaattctgtgaggtgaatgcacacattagaatgaagtttctcagaattcttctgtctagtttttatgtgaagatatttactatttcactataggcttcaaatgtctcacaaatatccctttgcagattctacaaaaatatggttgccgaacttctgaattaaaagaagcattcaactctgtcaaatgaatggagacatcacaaagaggttcctcagaatgcttctgtctagtttaaatgtgaagatatttctttttcaccatagacctcaaatggctcagaaatatacctttgcagattgcagaaaaatactgtttctaaactgctcaaacaaaataaagtttcaacactgtgagatgaatgcacacatcacaaagaagtttctcagaaagcttctgtgtagtttttatgtgaaggtatttcctttttccccataggccttaaaccgctcacaaatatccttctgcagatactaaaaaaatactgtttccaaactgctccatcaaaagaaaagttcacctctctgagatgaatgcacacatcacaaagaagtttctcagaattcttctgtctcgtttttatgtgaagatatttccattttcaccttaggccacaaagtgctccaaatatccatttgcagattattcaaaaagactgtttccaaacggctcaatcaaaagaaattttcaactctgtgagatgaaagcacacatcacaaagaactctctcagaaatcttctgtctagtttttatctcaagataattcctatttcaccataggaatcaatgggctcacaaatacccctttgcagattctacaaaagttctgtttccaaactgctcaatcaaaagaaacgttcaacattgtgagatgaatgcacacatcacaaagaagtttctcagaatgcttctgtctagttattatgtgaagatattttctttttcaccatagtctttaaaccactcaaaaatatccttctgcagatactacaaaaagactgtttccaaactggtccatcaaagaatgtttcaactctgtgagatgaatggactcatcacaaagaagtttctcagaattcttctgtctagtttttatgtgaagatatttcctttttcaccataggcctcaaatcgctctgaatatccatttgcagatcctacaaaaagaatatttccaaactggtcaatcaaaagaaaggatcaactctgtgagacgaaagcacacatcacaaagaagtttctcagaaagcttctgtctactttttatgtgaaggtatttccttttgcaccataggccttaaaccgctcacaaatataactccacttatactaccaagagactttctccaaattgctaaatcaaaaaaaatgttcaactctgtgagatgaatgcacacatcacaaagaagtttctgaaaatgtttttgtctagttttcatgtgaagatatttatttttcaccattggcctcaaactgctcagaaatatccccttgcagtttctacaaaaagactgtttccaaactgctcagtgaaaagaaatggtcaactcttagatatgaatggaaatgtcacaaagagttttctcaaaaagctactgtgtagtttttatgtgaagatatttcctttttcactataggccttaaaacactccaaatatacatttgcagattctacaaaaagactgtttccaaactgctcaatcaaatgaaaggttcaactctgtgatacaaacgtgcacaccacaaaggagtttctcagaaagcttctgtctagtttttatgtgaagatatttcatatttcaacataggccataaagggctcacaaatatccctttgcagattctaagagaagacattttccaaactcctcaatcaaaagaaaggtttaactctgtgagatgaatggacacatcacaaagaagtttcttagaaagcttctgtctagtttttatgtgaagatatttctttttcactataggcctcaaacggctaagaaatttccctttgcagcttctacaaaagactgtttccaaactgctcaatcgaaagaaaggttgaattctgtgacatgaattcacacatcacaaagaagtttttcagaaatcttctgtctagtttttatgtgaagatactttctttttcaccatgggcctgaaatagctccaaatatccatttgcagattctacaaaaaagactttccaaactgctcaatcaaagaaaggttcaacactgtgagatgaaagcacacatcacaaagaagtttctcagaaatcttctgtctagtttttatgtgaagatatttcatatttcaccacaggccataaagggctcacaaatatgccttgcagattctacaaaacgactgcttccaaactgctcaatcaaaagaaaggttcaactctgtgagatgaatggacatatcacaaggaagtttctcagaatgcttctgtcaagtttttatgtgcagatatttcgttttcaccataagcctcaaatggctcagaaatatccctttgcagattgtacaaaaagactgtttctaagctgctcattcaaaagaaagattcaactctgtgaaatgaaagtgtgcatcacaaagaagtttctcaaaatgcttctgtcttgtttttatgtgcatatatttcctttttaactgtaggcctcaaagctctccaaatatccttttgtagattcttcaaaaatactgtttccaaagttatcaatcaaaagaaaggttcaactctgtaggatggaagcacacatcacaaagaagtttctcagaaagcttctgtctagtatttatgtgaatatatttcctatttcatcatagaactcaaagggatcacaaatatccctttgcagattctacaaaaagactgcttccaaactgttcaatgaaaagaaaggttcaactcgtgaggtgaatgcacagataaaaaagaagtttctcagaatgcttctgtcaagtttttatgtgaagttatttctttttcaccatagacctcaaacccctcagaaatattcctttgcagattgcacaaaaagaatgtctccaaactcctcaatgaagagagaggttcaactctttgagatgaatgcaaatatcacaaagagtgatctcaaaaagtttctgtctgatttttatgtgaagatatttagtttttcaccataggcctcaaaccgctcacaaatatacctttgcagattctacaaaatgacttgttcccaaactgctcaatgaaagaaaggttcaaatatgtcatatgaaagcacacatcacaaagaagcttctcagaaagtttctgtctagtttttatgtgcagatacttcctttttcaccttatgcctcaaagcactccaaatatctgtttacagattctacaaaaagagtgtttccaaactgctcaatcaaaggaaaggttctactctgtgaaatgaaagcacacatcacaaagaagtttctcagaatgcttctgtctagttattatgtgaagatattacctatttcaccataaggtctcaaagggctcagaaatatccctttgcagattctacaaaaggactgtttccaaactgctccatcaaaaaaaaggttcaactctgtgagatgaaagcacgcatcacaaagaagtttctcagaaagcttctgtctagtttttatgtgaagatatttcctatttcaatataggcctcaaagggctcagaaatatccctttgcagattctatgaaaagtctgtttccgaactactcaatgaaatgaaaggttcaactctgtgggttggatgcacacatcacaaagaagtttcccagaatgcttctgtctaatttttatgtgaacatatttctttttcaccgtaggcctaaaactgctcagaaatatccctttacagattgtgcaaaaaaaccgtttccaaactgctcaatgaaaaggaagatttgactctgtgagatgaatgcaaacatcacaaagaggtttctcaaaaagcttctgtctggtttttatgtgaaggtatttcctttttcaccataggcctcaaaccactaacaaatatccctttgcagattctacaaaaagactgtttgcacactgcttaatgaaaagaaaggttaaactttgtgtgatgaaagcacacatcacaaagaagtttctcagaatgcttttgtctagttttatgtgaggaagtttcgtttttcaccatacacctcaaagcgctccaaatatgcatttgcagatttcacaaaaagactgtttccaaattgctcaatcaaaagaatggtacagctctgtgagataaatgcacacatcacaaaaagtttctcagaaaacttctgtttagtttttatgtgaagatatttcctttgtcaccaatggcctcaaagcactcctaatatccatttacagatttcacaaaaagagtgattccaaactgctcaatcaaaagaaagttttaactctgtgagatgaaagcatacatcacaaaggagtttcttagaaactttctgtctagtttttatgtgaggatatttcatatttcaaaataggtctcaatgggctcagaagtatacccttacagatgccacaaaaagagtgtttccaaaaagctcaatcaaaagaaaggtttaactctgtaagatgaatgcatacattacaaagaagtttctcagaatgcttctgtctagtttttttgagaagccatttcctttttcattatgggcctcagtccactcactaatagccctctgcagatactacaaaaagactctttccaaactgctcaatcaaaatgaagtttcaaatctgtgagatgaaagcccacgtcacaaagaagtttctcagaaagtttctgtctagtttttatgtgaagatattccctatttcaccttaggcctcaaagggatcacaaatatcccttttcgggttcttcaaaaaactgtttccaaactgcttcatcaaaagaaaggttcaactctttgagatcaatgcacacataaaaaattagtttctcagaatgcttctgtctactttttatgtgaagatattactttttcaccataggtctcaaaccgtaaacaaatattcctttgcagattgcacaaaaagtatgcttccacactgctcaataaacagaaaggttcaactcagtgagatgaatgcatacatcacaaagagttttctgaaaatgcttctatctgggttttaggtgaagatatttactttttcactataggcctcaaaccactcacaaatatccctttgcagattctacaaaatgaattgttgccaaactgctcaatgaaaagcaaggtccaaatctgtgagatgaaagcatgcatcacaaagaagtttctcagaaagtttctgtctagtttttatatgcagctatttcctttttcaaccataggcctcaaagcactccaaatatccatttgcaaattctacaaaaagagtgtttccaaattgctcaatcaaaacagaggtttaactctgtgaggtgaatgcacacagcacaaagtagtttttcagaaagcttctgtctagtttttatgtaaagacatttcctatttcaccataggccccaatgggctcacaaatatccctttacagattctataaaaggactctttccaaacttctcaatccaaggaaagtttcaactctctgatgtgaatgcagacttcacaaagaagtttctcagaatgcttctgtctagtttttatgtgaagatatttcctgttcaccataggcctaaaatgctgcaaatatccatcttcagattctacaaaaagactgtttccaaactgctcaatcaaaagaaaagttcaactctgtgagatgaaaacacacgtcacaaagaagtttctcagaaagcttctgtttagttttttttgtgaagatattccctatttcaccataggcctgaaagggctcacaaatatccttttgcatattctacaaaaagactgcttccaaactgctcaatcaaaagagaggttcaactctgtgtgatgaatgcacacattacaaagaagtttctcagaatgcttttgtctaggttttatgtgaagatatttctctatcacaatagacctcaaatggctcagaaatatccctttgcagattgtacaaaaagactgtttccaaactgctcaatgaaaagaaagtttcaacactgtgagatgaatgcacacatcacaaagaagtttctcagaaagcttctgtttagctttcatgtgaagatatttcctttttcaccataagcctcaatgggctcagaaatatccctttgcagattctatgaaaggactgcttattaaactgctcaatctaaagaaagtttcaactctgtgggatgaatgcacacatcataaacaagtttctcacaatggatctgtcggctttttatgtgaagatatattctttttaaccacaggccttaaaccgctcatgaatattcctctgcagatactacaaaaagactgtttccaaactgctgcatccaaagaaatgttcatcttcgtgagatgaatacacacatcacaaagaagtttctcagaatgcttctctctggttttcatttgaagatatttcctttttcaccataggcctcaaagtgttccaaatatccgtttacagcctctacaaaaagagtgtttccaaaccgctctttcaaaagataggttcatctctgtgagatgaaagtacacatcacaaagtagtttctcagaaagcttctgtctagtttttatgtgaagatatttccttttttaccataggccataaagggctcacaaatattttttgcaaatactactaaaagaatttttccaaactgctcaatccaaagaaagtttcaactctgtgagatgaatggacacatcacagagaagtttatcagaatgcatctgtccagtttttatgttcacataaaatatttatgtgataaatattttatgtgtgatatttatttaggcctcgatgggctcagaaatatccctttgcagattctaaaaaaggactgtttccaaactgctcaatctaaagaaaggttcacctctgtgagttgaatgcacacatcacagagaagcttcccagaatgcttctgtctagtttttatgtgaagttatttcctttttcagcataggcctcaaaccgctcacaaatattcctctgcagatacaataaaaggactgtttccaatctactatatcaaaagataggctcaacaacatgagatgaatgcacacgtcacaaagaagtttctcagaatgcttccatctagtttttatgtgaagatatttactttttaaccataggcctcaaaacactccaaacatccatttgcagattccacaaaaagactgtttccaaactgctcaatcaaaagaaaggttcaactctgtgagatgaaagcacacatcaaaaagaagtgtctcggaaagcttctgtctagtttttatttgaggatatttcctatttcaccacaggcctcaaaggaatcacaagtatccctttgaagattctacaaaaagactgtttccgaactgctcaatgaaaagaaagtctcaactctgtgaggtgaacgcacacataaaaaagaagtttctcagaatgcttccgtctagtttttatgtgaagatattactttttcaccataggcctcaaaccactcagaaatatccctttgcacattgtataaaaagactgtttatagactgctcaaagaaaagaaagattcatctctgtgagaggaatgcacacacacaaaagaagtttctcagaatgcttctgtatagtttttatgtgaagatattttatttttcaccataggcctttaactgttcacaaatatccccctgcagatactacaaaaagactgtttccaaactgctccaagaaaagaaaggttcaactctgcgagatgaaggcacacatcacaaggaaatttctcagaatgattctgtctagtttttatgtgaagataattctttttccccataggcatcaaatggctcagaaatatccctttgcaggttgtacaaaaagatggtttccaatctgctcaatcaaaagaaaggatcagctctgtgatatgaatccacacatcacaaagaagtttctcagaaagcttctttttagcgtttttgtgaagatatttcctttttcaccataggcctaaaagagctgcaaatatccatttgcagattctacaaaaagaatgtttccaaactgctcaatcaaaagaaaagttcatctctgtgagatgaaagcacacatcacaaagcattttctcagaaagattctgtcttatttttatgtgaagatatttcctatttcaccataggctgtaaagggctcacaaatatccatttgcatattcaaaaaaaaagactctttccaaactgctcaaacaaaagaaaggttcaaccctgtgagatgaatgcacacatcagaaacaagtttctcagaatgcttctgtctagttttgatgtgaagatatttctttttcaccatcggcctcaaatggctcagaaatatccttttgcagatttttacaaaagactgtttccaaactgctcaatcaaaagaaagattcaactctatgagatgaatgcacacatcacaagaagcttctcagaaagcttctgtttggtttttatttgaagatatttcctttttcaccataggcctcaatgggctcagaaatatccctttgcagattctacaaaaggactgtttagaaaactgctgaatccaaagaaagattcaactctgtgagatgaatgcacacatcacaaagaagtttcgcagaatgcatctgtctagtctttatgtgaagttatttcttttttgaccataggcctcaaagcactccaaatacccatttgcagattctacaaaaagagtttttccaaactgctcaatcaaaagaaaggttcaactctgtgacacggaagcacatgccacaaagaagtttctcagaatgcttctgtctagtttttttgtgaagatatttcctatttcaccttcggccatataaggctcaaaaatattttttgcagattctacaaaaagactttttgcaaactgctcaatccaaagaaagttttaactctgtgagatgaatggacacatcacaaaatagtttatcagaatgcttctgtctagtttttatgtgaagacatttctttttcaccctaggcttcaatgggctcagaaatatccctttgcagattctacaaaaggactgtttccaaactgctcaatcaaacaaaggtgcaacactatgagatgaatgcacacatggcagagatgtttctcacaatgcttctgtctattttttatgtgaaggtatttcctgtttcaccatgggcatcaaagcactccaaacatccatttgctgattccacaaaaagactgtttccaagctgctcaatcaaaagaaaggtacaactccgtgagttgaaagcacacatcacaaagaagtttctcagaaagcttctgtccagtttttatgtgaagatatttcccttttcaccatacctgtcaaagcactcaaaatatccctttgcagattctctgaaaagactgtttccaaacttctcaatcaaaagaatggttcaactctgtgaaatgaatgcacacatcaaaaagaagtttctctgaaatcttctgtctagtttttatgtgaagatatttcccttttcaccataggcctaaagccactcacaaatatccctttgcagattttacaagaacagagtttccagactcatcaaagaatagaaacttttatctctctgagataagtgcacatcttacagaacagcttctcagaaaaattctttatagtttttattgaagatatttcctttttcaccataggcgtcatagagctgacaaatatccctttgcagagtctacaaaaagtctgtttacaaactgctcaatcaaaagaatggttcaactctgtgagataaatgcactcatcacaaagagatttctcagaaatcttctgtctagtttttatgtgaagatatttcctttctcaccataggcctcaaagcactcataaatatccctttgcagattctacaagtagacagttttcaaactgctcagcaaaaagactgtttcaactctgtgagatgaatgcacacatgacaggggggtttctcagagaacttctgtctatttattatgtgaaggtatttcctttttcaccaaaggcctcaaagcactcacaaatatctccttgctttctgaaatatctccattccttctgaaaatattccaatcaatagaaaaagagggaatcctccctaactcatttgatgaggccagcatcatcctgataccaaagccggatagacacaaccaaaaaagagcatttcagaccaatatccttgatgaacattgatgcaaaatcctcaataaaatactagcaaaccgaatccagcagcacatcaaaaagcttatccaccatgatcaagtgagcttcatcgctgggatgctaggctggttcagtatacacaaatcaataagtgtaatccagcatgtaaagagaaccaaagacaaaaaccacatgattatctcaatagatgcagaaaaggtcttagaaaaaattcaacaacccttcatactaaaaactctctataaattaggtattgatggaacatatctcaaaataataaaagctatctatcacaaacccacagccaatatcatactgaatgggcaaaaactggaagcgttccctttgaaaacaggcacaagacagggatgccctctctcaccactcctattcaacatagtgttggatgttctggccaggacaattaggcaggagaaggaaacaaagggtgttcagttaggaaaagaggaagtcaaattgtctctgcttgcagacgacatgattgtatatctagaaaaccccattgtctcagcccaaaatctccttaagctgataagcaacttcagcaaagtctcaggatacaaaatcaatgtacaaaaatcacaaacattcttatagaccaacaacagacaaacagagagccaaatcatgagtgaactcccattcacaatggcttcaaagagaataagatacctaggaatccaacttacaaggaatgtgaaggacctcttcaaggagaagtacaaaccactgctcaaggaaataaaagaggatacaaatggaagaaaattccatgctcatgggtaggaagaatcaatatcgtgaaaatggccatacggcccaaggtaatttacagattcaatgccatccccatcaagctaccaatgactgtcttcacagaattggaaaaaactactttaaagttcatatggaaccaaaaatgagcctccattgccaagtcaatcctaagccaaaagaacaaagctggaggcatcacactacctgacttcaaactatactacaagactacagtaaccaaaacagcatggaactggtaccaaaacagagatatagatcaagggaacaaaaaagagccctcagaaataaggccgcatatctacaactatctgatctttgacaaacatgagaaaaacaagcaatggggaaaggattccctatttaataaatggtgctgggaaaactggctagccatatgcagaaagctgaaactggatcccttccttagaccttatacaaaaatcaattcaagatggattaaagatttaaacattagacttaaaaccataaaaaccctagaagaaaacctaggcattaccatgcaggacatatgcatgtgcaaggacttcatgtataaaacaccagaagcaatagcaacaaaagccaaaattgacaaatcagacctaattaaactaaagaacttctgcacagcaaaaggaactatcatcagagtgaacaggcaacctacaaaatgggagaaaatttttgcaacctactcatctgacaaagggctaatttccagaatctacaatgaacacaagcaaatttacaagaaaaaaaataacaacaccatcaaaaagtgagcgaaggacatgaacagacacttctcaaaagaagacatttatgcaaccaaaaaacacatgaaaaaatgctcaccatcactggccatcagagaaaagcaaatcaaaaccacaatgagataccatctcacaccagttagaatggcaatcattaaaaagtcaggaaacaacaggtgctggagaggatgtggacaaataggaacacctttacactgttggtgggactgtaaactagttcaaccgttgtggaagtcagtgtggcaattcctcagggatctagaactagaaataccatttgacccagccatcccattactgggtatatacccaaaggactataaatcttgctgctgtaaagacacatgcacacgtatgtttattgcagcattattcacaatagcaaagacttggaaccaactcaaatgtccaacaatgatagactggattaagaaaatgtggcacatatacaccatggaatactatgcagccataaaaaatgatgagttcatgtcctttgtagggacatggatgaaattggaaatcatcattctcagtaaactatcgcaagaacaaaaaaccaaacactgcatattctcactcataggtgggaattgaacaatgagaacacatggacacaggaaggggaacatcacactccggggactgttgtggggtggggggaggggggagggattgcattgggagatatacctaatgctagatgacgagttaatgggtgcagcacaccagcacggcacatgtatccatatgtaactaacctgcccattgtgcacatgtaccctacaacttaaagtataataataataaataaaagaaaaaaaaactacacagaagcattctgagaaagtattttgtgatgtgtgtattcaactcacagtgttgaacatacattttgatagaccagttttgaaactctgtttttgtagaatctgtaagtggatatttggagccttttgcagcctatggtggaaaaggaaatatcttcacatgaaaacaacacagaagcattctgagaaacctctttgtgatgtgtgcattcatctcacagattttaatctttcatttgattgagcaattttgaaacactgtttttgtagaatctgcaagtggatatttggagcgctttgaggcttatgttggaaaacgaaatattttcacataaaaacctcacagaagcattctgaaaaacttctttgtgatgtgtgcattatactctcagagttgaacctatcttttgatagagcagttttgaaagtctctttttgtaacgtctgcaagttgatatttggagctgtttacagcctaaggtggaaaaggtaatatctccacataaaaactacacagaagcatggtattggtgcgaaaacagaggtattgatcaatggaacagaacagggccctcagaaataacgctgcatatctacaactatctgatctttgacaaacatgagaaaaacaagcaatgggaacaggattcactatttaataaatggtgctgggaaaactggctagccatatgttgaaagctgaaactggatcccttccttacaccttatacaaaaactaattcaagacagattaaagacttaaacgttagacacaaaaccataaaaaccctaggagaaaacctaggcattaccattcaggacatatgcatcaccaaagacttcatgtctaaaacaccaaaagcaatggcaacaaaagacaaaattgacaaatgggatctaattaaactaaagagcttctgcacagcaaaagaaactaccatcagagtgatcagacaacctacaaaatgggagaaaatttttgcaacctactcatctgacaaagggctaatatccagaatctacaatgaactcaaaaaaatttacaagaaaaaaacaaacaaccccatcaaaaagtgggtgaagggcatgaacagacacttctcaaaagaagacttttatgcagccaaaaaaaaaaaaaaacatgaaaaaacgctcaccatctctggctatcagagaaatgcaaatcaaaaccacaatgagataccatctcacaccagttagaatggcaatcattaaaaagtcaggaaacaacaggtgctgtagaggatgtggagaaataggaacacttttacactgttggtgggactgtaaactagttcagtcatcaaccattgtggaagtcagtgtggtgattcctcagggatctagagctagaaatgccatttgacccagccatcccattactgggtatgtacccaaaggactataaatcatgctgctataaagacacatgaacatgtatgtttactgcggcactatgcacaacagcagagacttggaaccaacccaaatgtccaacaatgatagactggattaagaaaatgtggcacatatacaccatggaatactatgcagccataaaaaagaatgagttcatgtcctttgtagggacatggatgaaattgcaaatcaccagtctcagtaaactatcacaagaacaaaaaaccaaacaccgcatattctcactcgtaggtgggaattccacaatgagtacacatggacacaggaaggggaactctggagactgttgtggggtggagggacgtggagggataggtttcggagatatacctaatgctaaatgacgagttagtgggtgcagcgcaccagcatggcacatgtatacatgtgtaaccaaactgcacattgtgcacatgtaccctaaaacttaaagtataataataataaaataaaatttaaaaactacacagagccattctgcgaaatttctttgtgatgtgggcattcatctcacagagttgaaactttcatttgattgatcagttttgaaacaatctttttgtagaatctgcaagtggatattaggagtgctttgaggtctattgtggaaaaggaaatatcttcacataaaaactacacggaagcattctgagaaacttcatcatgatacgtgcattcaactctcagagttgaacccatcttttgatagagcagttttgaaactcacttttgtagagactgcatgtggatagttgtagcgctttgaggcctatgttggaaaaggaaatatcttcacctaagaactacacagaagcattctgagaatctcctttgtgatgtgtgcattcatctcacagagttgaacctatcttttgatagagcagttttgcactctctttttgtagaatctgcaagtggataattggagccttttgcagcctattttggaaaaggaaatatcttcacataaaaatgacagagatgcattctgagaaacctctttatgctgtgtgcattcaattcacagagttgaaactatcttttgatagagtagttttgaaaccctctttttctagaatctggaagtgggtatttagagccctttgcggcataaggtggaaaaggaaatatctttacataaaaactagacagatgcattgtgagaaatttctttgtgatgtgtgcattcatctgacagatttgagactttcatttgattgagcagttttgaaacactccttttgtatactatgcaagcggatatttggagcacattgaggcgtattgtggaaaagaaaatatcttcacataaaaactagacagaagaattctgagaaacttctttgtgatgtgtgcattcatctcaagagttgaatctttcttctgattgagcagacttgaaacacgctttttatggaatctgcaagtggatatttgaagcgctttgaggcctgtggtggaaaaggaaatatcttaatataaaaaatacacagaatcattctcagaaacttctttgttatgagtacattcaactcacagagttgaaactgtctttgaatagagcagtttagaaactctctttttttagactctgcaattggatatttggagccctttacagccaacggtggaaaaggaaatatcttcacataataactacacagaagcattctgggaaacttctttgtgatgtgtgcattcttctcacatggttgaaactttcttttgattgagcagttttgaaacactctttttgtatattatgcaagtggatatttggagcgctttgaggcctattgtggaaatgaaaatatcttcacataaaaacttgacagaagcattctgagaaacttcttcgtgatgtgtgcgttcatctcacagacttgaatatttcttcagattgagcagtcttgaaacacgctttttatggaatctacaagtggatatttgaagcgctttgaggcctattgtggaaaaggaaatatcttcacataaaaactacacagaagcattctgagaaacttatttgtgatgtgtgcattcatctcacagaattgaacttctctttcgattgagcagttttgaaacactctttttgtagaatctacagttggatatttggagcattttgaggactcttgtggaaaaggaagtatctccacataaaaaccacacagaagcattctgagaaacttcttctgatgtgtgcattcatatcacagagttgaacccttcttttgtttgagcagtttcgagacactctttttgtagaatatgcaagtggatatttggagcattttgagtcctatggtggaaaaagaaataccttcacataaaaactaacagaagcattctgagaaacttctttgtgatgtatgcattcatctcacagcattgagattatcttttgattgagcagttttgaatctcccttttggtagaatctgcaagtggatatttggagacctttgtgaccgatggtggaaaaggaaatatcttcctatgaaaactacacagaagcaaactgagaaacttctttgttacgttggcattcatttcacagagttgaaattttcattagattgagcagttttgaaacagtctttttgtagaatctgcaagtggatatttggagtgctttgaggcgtattgtggaaaaggaaatgtctccaaagaaaaactacacagaagcattctcagaaactattttgagatttgtgcattcatctcacagagttgaacatttcttttgatttagcagctggaaacagtttttgtagaatctccaagtggatatttgtaacacattgaggcctattgtggaaaaggaaatattttcacataaaaactacacagaagaattctgagaaacttctttgtgatgtgtgcattcatctcacagaggtgaacctttcttttgatggagcagttttgaaacactccttttacagaatattcaagtggatatttggagcgctttgagacctatgctggaaaagaaagtatcttcacataaaaactacacagaagcatactgagaaactactttgtgatgtgtgcattcatgtcacagagtttaacttttcctttgatagagcagttttgaaactctctttttttagaatctgcaagtggatatttagagccctttttggcctatggtggaaaaggaaatatcttcacataaaaactacacagatgcactctgagaaatttcttcatgatgtgttcattcatctcacagagttgaaccattcttttgattgagcagttttgaaacactctttatgtacaatgtgcaagtggatatttggagcgctttgagacctatggtggaaaaggaaatatcttcactaaaaacagcacaaaactttctcagaaacttctttgtgatgtgtgcattcaactcacagagttgtacctatcttttgatagagcagttttgaaactctctttttgtggaaagtgcaagtggatatttggagccctttgtggcctacggtggaaaaggaaatatcttcacatgaaaactacaaagaggcattctgagaaacttgtttgtgatgtgggcattcatctcacagagttgaacctttcttttgattgaggagttttgaaacactctttttgtaggaactgcaagtggatatttggagcactttgagaactatggtgaaaaggaaatatcttcacataaaaaactacacagaggcaatctgagaaacttctttgtgatgtgtccattcatctcacagagatgaacctttcatttgaatgaggagttttgaaacagtctttttgtagaacctgcaagtggatatttggagggatttgaagcctaatgttgaaaaagaaatatcttcacataataactacacagaagcattctgagaaacgtctttgtgatgtgtgcattcatctcacataattgaacctatcttttgattgagcagtttggaaacactctttttgtagtatctgcaagtcgataattggagggctttgaggcctatggtggaaaaggaaatatcttcacataaaaactacaccaaagcattctcagaaacttctttgtgatgtgttcattcgactcacagagttcaacctaacttttcaaagagcagttttgaaactctctttttatagaatctgcaattggatatttggagacatttgcaccctatggtggaaaaggacatatcttcacttaaaaactacacagaaacttcctgagaaacttccttgtgatatgtctattcaactcgcagagttgaacctatctcttgatagagaagttttgaaagtctttttttagggaatctgcaagtggatatttggatccctttgtggcctatggtggaaaaggaaatatcttcacataaaaacttcacagaagcatcctgagaaacttctttgtgatgtgtgcattcatctcacagagttgaacctatcttttgattgtgcagtttccaaacaatcttcatgtagaatctgcaagtggatatttggagccctatgaagccaatgctggaaaaggaaatgttttcacataaaaactgcacagaagcattctgagaaatttgtttgtgatgtatgcattcaactcttggagttgaacttatcttttgatagagcagttttgaaactctctttttgtagaaactgcatgtgattatttggagccctttgtggataatgatggaaaatgaaatatcttcccataaaactacacagaagaattttgagaagcttctttgaatgtgtgcattcatctcacagagttgaacatttcatttgattgaggagttttgaaactctctttttgtagaatctgcaagtggatatttagagaactttgaggtctattgtggaaaaggaaatatcttcacataaaaactacacagaagcattctcagaaactactttgtcatgtgtgcattcgtctcacagagtggaactcttcttttgatagagcagtttggaaacgctcttttagtactatctggaagtggatatttggagcgctttgaggcttatggtggaaaaggaaagatcttcacttaaaaactatacagaagcattctgataaactactttgttatgtgtggattcaactcacagagttgaacctatcttttgattgagccattttgaatctctctttttgtagaatctgcaagtggatatttggacctctttccagcctattttgtaaaaggaaatatcttcacatataaactacacagaagcattctcagaaacttctttgtgatatgtgtattgaaatcatcgagttcaacctatcttttgattgagcagttttgagtctctgtttttgtggtatctgcaagtggctatttagagccctttgcggcctctggtggaaaaaaaatatcttcacataaaaactacacagaagcgttctgagaaactactttgtgatgtgtgcattcatctcacagggttgaacctttcttttgattcagcagttttgaaacactctttttatagactctgcaagtggatatttgaagagctttgagtcctatcgtggaaaaagaaatatcttcacataaatactaaacagaagcattctgagaaacttctttgtgatgtgtgcattcacctcacagagttcaaactttcatttcattgagcagttttgaaacactctttttgtagaatctgcaagtggatattaggagcactttgaggactatggtggaaaaggaaatatcttcacttaaaaactatacagaagcattctgataaactacttcgttatgtgtggattcaactcacagtgttgaacctatcttttgattgagccattttgaatctctctttttgtagaatctgcgagtggatatttggagctctttccggcctatattgtaaaaggaaatatcttcacatgtaaactacacagtagcattctgagaaacttcttggtgttgtgtgcaatcatctcactgagttgaacctttcttttgattgagcagttttgaaacactctttttatagtatctgcaagtggatatttgaattgctttgagacctattgtggaaaagaaagtatcctcacataaaaactgcacaaaaacattctgagaaacttcttctgatgtgtgcattcatctcaaagagttgaaactttcttttgtttgagcagtttcgagacgctctttttgtagaatatgcaagttgatatttggagcgttttgaggcccatggtggaaaaagtaatatcttaacataaaaactaatggaagcattctgagaaacttctttgtgatgtatgcattcatctaacagagctgaacatttcttttgactgagcagttttgcatcactctttttgaagaatctgcaagtggatctttggagcgctttgtggcctgtagtagaaaaggaaatatcttcacataaaaagtagacagaagcattcttaggaactacattgttatgtgtgaattcatcttacagagttgaacctttcttttgattgagcagttttgaaacactatttttgtagaatctgcaagtggatatttggtgtgctttgagccctatggtggaaaaggaagtatcttcacataaatctagacagaagcattctgagaaacttctttgtggtgtctgcctgacacacagggttgaaccttccttttggttgaaaagtttcgatacagtctttttgtagaatctgcaagtgggtatttggagagctttgcgtccaccagtggaaaaggaaatatcttcacataaaaactatacagaagcattctgagaaacttctttgtgatgtgtgcattcatctcacagaggtgaacatttcttttaaatgaacagttttgagacactctttttgtacaatctgcaagtggatatttggagcactttgaggcccttagtggaaaaggaaatatcttcacataaaaactagacagatcattctgagaaacttctttgtgatgtgtgcgttcatctcacagagttgtacatttcttttgatggagcagttttgaaacactctctttgtagaacctgcaagaggatatttggagcgctttgtggcctatggtggaaaaggaaatatcttcccataaaaaccagacagaagcattctgagaaacttctttgtgatgtgtgcattcattacacaaaggtgaaactttcttttgattgagcagtttgcaacactacttttctagagtctggtattggatatttggagcgatttgcagcctatggtgtaaaagaaaatatcttcacataaaaagtagatagaagcattctgagaaacttctttgtgatgtgtgcattcatcccacagtgtttaacctatcttttgattgagcagtttggaaaccttcttttggagaatctgtaaatggatatttgaagggttttgaggactatggtggaaaaggaaatatctttacataaaaactaggcagaagcattctgtgaaacttccttgtaatgtacgcattcatcgcacaaagttgaacctttgttttaattgagcagttaagaaacactctttttgtagaatctgcaagtggatatttggcatgatttgcagcctatggcataaaaggcaataccttcatataaaaactagacagaagtattctgggaaacttctttgtgatgtgtgaattcatctcacagagttgaacctgtctttttattgagcagttttgaaacactctttttgtggaatctgcaagtgaatatttggagcattttgaggcctatggtggaaaaggaaatatcttcacataaaaactagacagaagcactctgagaaactactttgtgatgtgtgcatgcatctcacagagttgagtctttcttttgattgagcagttttgaaacactcttttgtagaaactgccagtagatatttgggatgcttagtggcctatggtgaaaagggaaatatcttcacacaaaaacagaagcattctgagaaactactttgtgatgtatacattcatctcacagagttgaacctttcttttgattgagcagttttgaaaaactcttgatgtagaatctgcaagtgtgtatttggagcactttgcagcctatggtagaaaaggaactatcttcgcataaaaactaggcagaaacattctgagaaacctctttgtgatgtgtgcattcatctcacagagttgaacctttcttttaattgaacagttttgaaacactctttttgtggaatctgcaattggatatatggagcgctttgaggcctatggttgaaaagcattatcttcacataaaaacgtcacagaagaattctgagaaacttctctgtgaggtgtgcattcatctcgcagagttgaacctttcttttcattgagcagttttgaaaccctctgtttgtagaatctacaagtggagatttagagttctttgagtcctatggtggaaaaggaaatatcttcacataaaaactagacagaagcattctgagatacatctttgtgatgtgtgcattcatctcatagtgttaaacctttcttttgatggttcagttttgaaacactctttttgtagaatctgcaagtgtatatttggagcactttgcggccaatggtggaaaaggaaataccttcacataaaaactagacagaagcattctcagaaacttctttgtgatgtgtgcgttcatctcacagaattcaaccttgctttttttgagcaggttggaaacacttttttttagtatctgctagcagataattggagtggtttggggcctatggtggaaaaggaaatatcgtcacataaaagctagacagaagcattccgagtaacttctttgtgatgcgtgcattcatctcacagagttgtacctttcttttgattgagcagttttgaaacacactttttgtggaatctgcaaatgtatatttggagcgctttgcagcctatgggggaaaaggaaatattttcgtataaatgctagacagaagcactctgagaaactgtattgtgatgtatgcattcatctcacagaggtgaaacttccttttgattgagtagttttgaaacactctttttgtacaatctgcaagtgggtatttggagccctttgtggtatgtggtggaaaaggaaatatcttcacataaaaactagacagaagcattctgagaaacttctgtgtgatgcgtgcattcatctcacagagttgaacctttcttttcattgaacagttttgaaactctgtttttgaagtatctgcatggggatatttggggctctttgaggtctttggtggaaaaggaaatatcttcacataaaaactagacagaagcattctgagaaagttctttgtgatgtgtgcgttcatctcaaagagttgaaaaattcttttgatagagcagttttgaaacactccttttgtagaatctgcaagtggatatttggagctctttggggcctatggtggaaaaggaaatatcttcacgtaaaaactagacagaaggattctgagaaactactttgttatgtgtgcattcatctcaaagtgttgaatctttctttcgattgagcagttttgaaacactccttttgtagaatgtgaaagtggatatttggagcactttgtggactattgtggaaaaggaaatatcttcacataaaaacaagacagaagcattctgaggaacttctttgttatgtctgcattgaactcatagagttgaaactttcttttgactgagcagttttgaaacactctttttgtagaatctacaagtggatatttggagtggtttttggcctaaggtggaaaaggaaatatcttcacataaaaactagacagaagcattctgagaaacttctttttgatgtgtgcattcatctcaccgagttgaaaatttcttttgattcagtacttttgaagcactctttttgtagaatctgcaagtgaatatttggagaccttagcggcctatggtggaaaagaaaatatcttcaaataaaaactagacagcaccattctgagaaattctttgtgatgtgtccattcgtgtcatagagttgaatctttcttttgattgagcagttttgaaacacactttttgtataatccgcaagtgaatatttggagcgctttgcggtctatggtagaaaagaaaatatcttcaaagaaaaactagacagaagcattctgacaaacttgtttgtgatgtgtgcatttatctcacagagttgagcctttcttttgattgagcagtttggaaacactctttttgtagaaactccaaattggtatttggagtgctttgaggtctatggtggcaaaggaaatatcttcacataaaaactagatggaagcattctgagaaacctctttgtgctgtgagcattcatctcacagagtggaatgcttcttttgattgagcagttttgaaacactctttttgtacaatctgcaagtgtatatttggagcactttgaggcctatcttggaaatggaaatatcttcacataaaaactagacagaaacattcggacaaacatctttttgatgtgtgcattcatctcacagagttgaacctttttttttaactgagcagttttgaaccattatttttgtagaatctgcaactggatgtttggagcactttgctgtctatggtggaaacggaaatatcttcacatagaaactagacagaagcattctgagaaacttctttctcatgtatacattcatctcatagagttgaacctttcttttgattgagcgcattgaggactgtggtggaaaaggaagtatcttcacataaaaacttgacagaagaattctgagaaacttctttttgatttgtgccttcatcttaccgagttgaacccttcttttgattgagcagttctgaaatagtccttttgtagaatccgcaagtatatgtttgcagcaccttgttgcctatggtggaaaaggaaatatcttcatataaaaattcaacagcaacattctgagaatcttctttgtgatgtctgcattcatctcatagagttgaacctttttttttttaattgagtagtgttgaaacactctttttgtacaatctgcaagtggatatttggagcactttgaggcctatggtggaaaaggaaatatcttcacataaaaattagacagaagcattctgagaaacttctttgtgatgtgtgcattaaactcacaacgctgaacctttcttttgattgtgcagtttttaaacacggtttttgtggtatctgcaagtggatattttgcgtgatttgtgacctttactggaaaaggaaatatcttcacagaaaaactagacagaagcattctgagaaacttatttgtgatgtgtgcattcatgtcacagagttgaagctttattttaattaagcagttttgaaacactctttttgtagaatctgcaggtggatatttggagcactttgaggcctatggtggaaaacgaaatatctttaaataaaaattagacagaaccattctgagaaatttctttttgatgtgtgcattcaactcacagagttgaacctttctattgattgaacagttttgaagcactctttttgtagaatctgtaagtggatatttggagcgctttgaggcctatgttggaaaaggaaatatcttcacgtaaaaattagaccgaaggattctgagaaacttctttgtgatgtgtttgctcttctcacagagttgaacatttcttttgattgatcagttttgaaacactctttttgtagaatctgcatctggatgtttggagcactttggggcccatggtggaaaaggaaatatcttcacataaaaactacacagaagcaatctgagaaacttctttgtgatgtgtgcattcaactcacagagttgaacctttgttttgaatgatcagttttgaaacactctttttgtaatacttaaaaatggatatttggagtggattgaggcatacggtggaaaaggacatatcttcacataaataatagaagcattctgagaaacttatttgcgatgagtgtattcaactcacagagttgaaactttcttttgattgagcagttttgaaacactctttttgtcaaatctgcaggtggatattttgagagctttgaggcctatggtgcgaaaggaaatatctccacataaaaattagacagaagcattctgagaaacttctttatgatctgtgcattcatctcacaaagttgaaactttcttttgattagacagtttggaatcagtgtttttgtagaatctgcaggtggatatttggagcgctttgagacctatggtgaaaaggaaatatcttcacataaaaaatagacagaagcaatctgagaaacttctttgtcatgtatgccttcatttcacagacttgaacctttgtgttgattgcgcagtttggcaacaatcgttttgtagactctgtagagggatattttccagaccactgaggcctctggagaaataggaaatatcttcagataagaaatagacagaaacattctgagaaacttccttctgatgtgtgcattcatctcacagagttgaacttttcttttgattgagcagtttggaaacagtctttctgtactatctgcaaatggatatttggagtgctttgaggcatacgttgaaaaaggaaatatattcacataaaaacttgacagaagtattctgaggaacttcttttttatgtgtgcattcatttcacagagttgaacctttcttttgattgagcagttttgaaacactcttcttgtagtatctgcaagtggatatttgtagcattttggggcctatagaggaaaaggatatatcttcagatgaaacctagacagaagcattctgagaaacttctctgtgatttttgcattcatctcacagagttgaaccttttttttgattgagcagtttggaaaccctctttttatagaatctgcatgggtatatttggagcgctttgtggcctatagtggaaaaggaaaaaacttcacataaaaactagacagaagcattctgagtaacttcttgtgacttgtgcattcatctcacagagttgaatctttcttttgattgagcagtttggaaaccatcctcttgtagaatctgcaagtgtatatttggagcgctttgtggactacagtggaaagggtaatatcttcacattaaaactagacagaagcattatgagaaacttgtttatgatgtgtgcattcatatcacagaggtaaacctttcttttgattgagcagtttggaaacagtcattttgtacaatctgcaaagggatatttgagaaacccattgaggcctctggggcaataggaaatatcttcatgtaaaaactagagagaaactttctgagaaacttctttgtgatgtgtacgttcatctcagagttgaacctttcttttgattgagaagttttgaaacactctttttatagaatctgcaagtggatatttggagtgctttgcagcctatagttgaaaaggaaatatcatcacttaaaaactagacagaagcattctgagaagcttctttgtgatgtgtgcattcacctcacagagttgaacctttctcttgattgagctgttttgaaacacactttttgtagaatctgcaagtggatatttgttgtgctttggggcctatggtggaaaagggaatatcttcacataaaaactagacagaagcaatctgagtaacttctttgtgctgtgtgcattacactcacagagttgaaactttcttttgtttgagcagtgttgaaacactctttttgtagaatctgaaattggatatttggagcgctttgcggactctggttgaaaaggaaatatcttcacataaaaactcgacataaacattctgagaaactgctttgtgatgtctgcattcatctcactgagttcaaactttcttttgattgaccagctttgaaatactcttcttgtagtatctgtaagtggaaatttgttgcaatttgaagcctttgttggaaaaggaaatatcttcatgtgaaaactagacagaagcattctgagaaacctcttagtgatgtgtgcattcatctcagagtgttgaaccacactttgattgagcagtttggaaacagtctttttgtagtatctgtatgtggatatttggagtgctttgatgcctatggtggaaaaggaaacattttaacataaaaattagacagaagcattctgagaaacttctttgtgttgtttgccttcatctctcagatttgaagctttcctttgattgagcagttttgcaacactctttttgtagaatctgctagtggatatttggagcgctgtgaggcctatggtagaaaaggtcataacttcacataagaactgtaaaacaggcttcctaaaaacagccttgtgatgtgtgcagtcatctcacagaggtaagcagttcttttctctgatcagtctggaaactctgttcttgtacaatctgaaaaggggtatttttgagcactttgaggcctatgttgacaaaggaaatatcttcacaaacaaagtgtaaagaaattttctgagatacttctttgtgatatgtgcattcatctcacagatttgaccctctcttttgcttcagcagttttggaaacagcatttttgcagaatctgccaatggatatttgtgagcactttgaggcctatgcagaaaaagaaatatcttcacagaaaactataaagaaggtttctgagaaactgttttgtgatgtctgcattcatctcacagaggtaatcaattcttttctttgatcagttgggaaactctgttgttttagaatctgctaagggatatttgtgagtgcatagagccctgtggtgaaaaaggaattgtcttcacataaaaactagacagaaccctactgagaaactttttggtgatgtatgcattcatctcacagaattgaaactttcttttgattgagcagtttagaaacgtctttttgtggaatctgtaaagggatatttctgagcactttgaggcctatggtgaaagagaaaatatcttcacataaaaaccagactaaagaattctgagaaactgctttgtgatgtatgcattcatctcacagagttcaacaattcttttgattgagcagttgggaaaccatctttttgtagaacctgcaaaggtatatttgtgagtgctttgaggtctaagggtaaaaggaaatatctttacataaaaagtataaagaaggtttgtgaacaacttctttgtgatgtgtgcattcatctcacagagttgaaacattctttgactcagcagtttggaaacagtctttttttaagatctgcaaagggatattttcgagcactttgagtaccatggtgaaaaaggaaactcattcacataaaaacaagataaaagctttctgagaaacatctttttgatatatgcattcatcccacagaggtgaaactttcttttgatgagcagtttgtaaacagtattttgtagaatttccaaatggttattagttagtgctttgtgtcctatgttgaaaaaggaattatatttgcataaatactagacagaatatttctgagaaactgctttgtgatgtgtgctttcatctcacagaggtaaccatttctcttcattgagcagattggaaattccgttcttgaaaatctgcaaagggatatttttcagtgctttgaggcatatgatgaaaaaggaattatcttcacgtaaaaactagacagaagttttctgtgaaacaccttggagatgtgagaattcatctcacagagttgaaacattcttttgattgagcagtttgtaaacaatattttttagaatctgcaaagggatatttgtgatgctttgacccctatggtgaaaaaggaaatattttcacatgaaaactagaaagaagctttctgagaaacctccttgtgatgtgtgcattcatctcatagatttgaacctttctttggattgagcaatttggatacagtatttttgtagaatctgtaaagacatatttttgagacctatgaggcctatgatgtaataggaaatatcttcacataaaaactagacagaagctttctgagaaacttctttgtgatgtgtgcattcatctcatagagttcaaccattcttttgattgaacagtttggaaatagtctttttgtagaatctgcaaagggatatttatgagtcctttgaggcatatggtaaaaaagaaaatatattcacataaaaagtataaacaaagtttctcagaaacagctttgtgatgtatgcattcatctcacagaggtaaacgtttcttttctctggtcagtctggaaactgttcttgtagagtctgcaaagggatatttgtgagtgctttgaggcctatggtgaaaaagaaaatatattcacataaaaagtataaacaaagtttctcagaaacagctttgtgatgtatgcattcatctcacagaagtaaacgtttcttttctctggtcagtctggaaactgttcttgtagagtctgcaaagggatatttgtgagtgctttgaggcctatggtgaaaaaggaaatatcttcacataaaaatagagagaggctttctgagaaacctctttgtgannnnnnnnnnnnnnnnnnnnnnnnnnnnnnnnnnnnnnnnnnnnnnnnnnnnnnnnnnnnnnnnnnnnnnnnnnnnnnnnnnnnnnnnnnnnnnnnnnnnnnnnnnnnnnnnnnnnnnnnnnnnnnnnnnnnnnnnnnnnnnnnnnnnnnnnnnnnnnnnnnnnnnnnnnnnnnnnnnnnnnnnnnnnnnnnnnnnnnnnnnnnnnnnnnnnnnnnnnnnnnnnnnnnnnnnnnnnnnnnnnnnnnnnnnnnnnnnnnnnnnnnnnnnnnnnnnnnnnnnagggaagtttctcagaaagcttctgtctagtttttatgtgaagatatttcctttttcaccatatgtctcaaaacgccttcaaatatccctttacagattctacaaaaagactgtttccaaactgctcaatcaaagcaaagttttaactctgtgagatgaatgcacacatctcagagaagtttctcagaaagcttctgtatagtttttttgtaaagatatttcctatttcaccataggcctcaaagagctcaaaaatgtctccttacagattctacaaaaagactgtttttgaactggtgaatcaaaataaatgttcaactctgtgagatgaatgtgtacatcctaaagaagtttctcagaaagcttctttataggtttaggtgaagatatttcctttttcaccataagcctgaaagcattcacagatatcactttgcagattgtacaaaaagacggtttaaaaactactcaatcaaaacaaaagttcaactatgtgaaatgaatgcacacatcacaaagaggtttctcagaaagcttctgtttatattttatttgtggataattcctttttcaccataggtttcaaaccgctcacaaatattccttgcagtttctaaaaaagactgttttcacactactcaatcaaaagagaggttcaactctgtgacatgaacacacacatcacaaagaagtttctcagaaaccttctgtctagtttttatgtgaagataattcctttttcaacataggcctcaatgggctcaaaaatatccctatgcagattctacaaaaagactgtttccaaacttctcaatcaaaaggaagattcaactctgtgagatgaatgcacacatcacaaagaagtttctcagagatcttctgtctagatattatttgtggatatttcctctttcaccataggcctcaaagggctcatagatatccctttgcagattctacaaaaacactgtttccaaactgctcaatctaaagaagggttcaacactgtgagctgaatgcacacatcacaaagaagtttctcagaatgtttctgtctagtttttatgtgaagatatttccttttacaccataggcctcaaattgctaaaaaatgtccctgtgcagattctacataaggactgtttccaaactgctcaatgaaaggaaaggttcaactctgtgagatgaaaacacacaacatgacgaagtttctcagaatgcttctgtctagtttttttgtgaagatcttccctttttcaccataaatctcaaattgttcacaaatatcactttgcagattatacaaaaagacagctcccaaactgctcaatcaaaacaaagattcaactctgtgagatgaatgcacacatcacaaagaagtttctcagaaagcttctgtctagtttttatgtgaagatatttccttttccagtagaggctgcaaagcgctctaaatatccacttgcagattcttcaaaaagagtgtttcaaaactgctcaatcaaaagaaaggttcaactctgtgagataaatgcacacatcacaaagaagtatctcagaatgcttctctctagtttttatgtgaagatatttccttttccacaataggcctcaaagcacaccaaatatccacttgcagattctacaaaaagttgtttccaaactgttttatcaaaggaaggttcaactcggtgagatgaatgaacacatcacaaaaatgtttctaacaaagcttctgtctaggttttatgtgaagatatttcctttttcaccatagacctcaaaactctctcaaatgtccctttgcagattctacaagaagatggtttccaaagttctccatcaaaaggaaggttcatatctgtgaggtgaatgcacacatcacaaagaattttgtcagaaagcttctgtctagttgttatcagatgatatttcctttttcaccataagcttcaaagccttcagaaatatcagttttcagattctacagaaagtgtgtttccaaactgctcaatgaaaagagaagttcaactctgagagatgaatgcacacatcacaaagaggtttctcagaaatcttctgtctagtttttatgtgaagatatttcctttttcaccataggcctcctaccgctcacaaatatccctttgcagattctacaaaaagactgtttccaaactgctcaatcaagagaacggttcaactctgtgacataaatgcatacgtcacaaagaagtttctcagaaatattctgtatagtttttatgtgaatatatttattttctcacaatatgccttaagccactcacaaatatccctttgcagatgctccaaaaagacggtttccaaactgttcaatcaaaagtaaagttcaacactgtgaaatgaatgcacacatgacaaagaagtttctcagaaagcttctgtgtagattttatttgtggatatttcgtttttcaccataagcctcaaaccactcacaaatatccctttgcggaatctacaaaaagaatgtttccaaactggtcaatcaacagcaatgttgaaatctgtgagacgaatgcacacatcacaaaaaagcttctcagaaagtaatatccctttgcagaatctacaaaaagactgtttccaaacttctcaatcaacagcaacgttgaaatctgtgagatgaatgtacacatcacaaaaaagcttctcagaaagtttctgtctattttttatgtgaagatatttcctttttcaacataagcctcaaatcgttcacaaatatcattttgaagattctacaaaaagactgtttccaaactgctcaatcaaaagaaaggttcaactccgtgagatgaatgcagacatcataaagaagtttctcaggaatattctgtctagtatgtatttgtagacatttcccttttcaccatagggctcaaaccacacacaaatatccattcacagatctacaaaagactctttccaaacagctcaattaaaagaaacgttcaactctgtgagatgaatgcacacatcaaatagaagtttctcagaaagcttctgtctagtttttatatgaatatatttcctttttcaccattagcctaaaagctttcaaaaatgtccctttgcagattctacagaaagactgtttcctaactgctcaatcaaaatattggttcaaaactgtgagatacatgctgacataacaaagaagtttctcagaaagattctgtctagtttttacctgaatatatttactttctcaccttaggcctcaaaccgctcacaaatatccctttgcggatgttccaaaaagacaatttacaaactgctcaatcaaaagaaagtttcaacactgtgatatgaatgctcacatcacaaaaaagtgtctcagaaatcttctgtctagattttatttgtggatatttcctttttcaccataagccataaaccacttaaaaatatccctttgcagattctacaaaaagacaatttacaaactgttcaatcaaaagaaagtttcaactctgtgagatgaatcctcacatcacaaaaaaagtgtctcagaaagcttctgtctagattttatttgtggatatttcctttttcaccataagccataaactgcttaagaaatccctttgaagattctacaaaaagtctgtttctaaactgctcaatcaaaatgatggttcaacaatgtgagtcgaatgcacacatcacaaagaagtttcacagaaagattctgtccagattttattagtggatatttcctttttcaccataagcctgaaagggctcacaaatatcccttggcagaatcttcaaaaagactgcttacaaactgctcaatcaaaagaaatgttcagctctgtgtgatgaatgcacacatcacaaagaagattctcagaatcattctgtctaatttttatgtaaagacatttcatttttcatgataggtgtcaaccgcctacgtatatccctctgcagatttttcaaaaagactgtttccaaactgctcaatcagaagaaaggttccactctgtgagatgaatgcacacatcacaaagaagtttctcagaaaggtgttgtctagtttttatgtgaagacaattcctttttcaccataagcctcaaagcattcacaaatttcactttgcatattctacaaaaagactgtttcaaaactgctcaatccaaagaaactttcaattttgtgagttgaatgcacacatcaccaagacgcttctcagaactcttctgtctagattttatttgtggatatttcctttttcaccacaggcctcaagccgttcagaaatgtccatttcagaatctacaaaaagactgcttccaaactgctcaatctaaagaaaggttacacactgtgagatgaatgcacacaacacaaagtagtttctccaaaagttttgtccggttttcatgtgaagatatttcctttctcaccataggcctcaaaccactcacaaatatccctttgtagattctccataaagactgtttccaaactacaatgcacacatcacaaagaagtttctcagaaagcttctgtctagtttttatgtgaatatattttctttctcaccataggcctcaaaccactcacaaatatccctttgtagatgctccataaagactgtttccaaactgctcaatcaaaagaaaatttcaactctgtgtgatgaatgcacacatcacaaataaatttctcagaaatgttctgtctagtttttatgtgatggtatttcctttttcaccatagtccttaggccgcctacatatatatatccctttgcatatactacaaaaagactgtttccaaactgctcaatcaaaagaatggttcaactctgtgagacgaatgcatatttaagcaagaagtttcccagaaattttctgtctagtttttatgtgaagatatttcctttttcaccataagcctcaaagagttcacaaatatttctttgcagattctacgaaaagactgtttccaaactgctcaatcaaaacaaagtttcaactttgtgagatgaatgcacacatcacaaggaagcttctcagaaattttctgtctaggttttattagtgatatgaagatatttcctttttcaccataaacctcaaagcactcacaaatgtccctttgaagattctacataaagactctttccaaaatgctcaatcagaataaaggttcaaatctccgagatgaatgtacacatctccaagaagtttcccagaatgcttctgtctagtttttaagtgaagatatttcctttttcaccataagcctctaagctttcacaaacatcgctttgcagattctacaaaaatacagtttccaaactgcttcatcaaaaggaaagttcaactctaagattaatgcacaaatcacaaagaagtttctcagaaagtttctgtctagattttatttgtggatatttactttctcaccatagacatcaaactgctcacaaaaatcccttcacagaatctgcaaaaagactgtttccaaactgctcaatcaaaagaaagttttaactctgagagccaaatgctcacatcacacagaagtttatcagaaagtttctgtctagtcttaatgtgaggatatttctgttttcaccataagcctcaaagtgttcaaaaatattccatgcagattctacaaaaagagtgtttccaaactgctcaatcaaaagaattgttcaactatgtgagatgaatgtacatatcacaaagaagtttctcagaacgcttgtatctaacatttatgtgaagatattttctttttcaccataggcatcaaagcgttcacaagcatcactttgcagattctacaaaatgactgcttccaaactgctcaatgaaaataaaggtcaagctctgtgagctgaatgcacacatcacaatgaagtatctcagaaagcttcagcctaatttttatgtgaagatatttcctatttcaacataggcctcagatgcacactaatgtccctttgcagtttctagaaaaatattgtttccaaactcctcaatcaaaacaaaggttcaactctgtgagatgaatgcaaacatcaaaaagaagtttctcataaagcttctgtctacattttatttgtggatatttcctttttcacagtaggcctcaaagtgttcacaaatgtccctttgtagattctacaaaaagactgtttccaaactgctaaaccaaaagaaaggttcaactctatgaggtgaacgcacacatcacaaagaagtttctcagaaagcttctgtctattttttatgtgaacatatttcccttttcaccataagcctcaaagcataaacaaatatcactttgcagattctacaaaaagactgcttccaaagtgctccatcaaaacgaagattaaattctctgagatgaatgcacacatcatgaagtagtttctcagaatgcttctgcctagtttttatgtgaagatatttctttttcaccataggcctcaggcgcacacaaatgtccttatgcagattctacaaaaacacagtttccaaactgctcaatcaaaagaaaggttcaactctgtgggatgaatgcacacatcacaaagaagtatctcagaatgcttctgtctagttttaatgtgaagatatttcctctttgaccacgtgcctcaaactgcctacaattatccctttgtagattctagaaaaagactgtttccaaactgctcaatcaaaagaaagtttcaactctgtgaggtgcatgaacacatcacaaataagtttctcagaaagcttctgtctagtttttatgtgaagatatttcctttttcaccataggcctcaaacagtctacaaatacacctttgcagaatctacaaaaagactgtttccaaactgctcaatcaaagcaaagtttcaaatctgtgagatgaatgcacacatcacaaagaagtttctcagaatgtttctgtctagattttattagggcaaatttcctttttcaccataggcctcaaaccactccaaatatcccttggcagatcctacaaaaatactgtttccaaactgctcaatcaaaagaaattttcaactttctgtgatgaatgcacacatcagaaacaagtttctcagtagatttctctctggtttttatgtgaagatatttcctttgtcaccataagtctcaaagcattcacaaaaatcactttgcagattgtacaaaaagacttttgccaaactgctcaatgaaaagaaaggttcaactctgtgacatgaaggcacacatcataaataagtttctcagaaggcttctctctagtttttatgtgaagatatttcctttctcaccgtaggcctcaaaccgttcacaaatatccctctgcatattctacaaaaagactgtttccaaagtgctcaatcaaacaaaaggttcaattctgtgatacgaatgcatgcatcacaaagaagtttctcagaaatcttccatctagtttttatgtgaagatatttctttttcatcataggcctcaaaccactcaaaaatatccttctgcagattcaacaaaaattctgcttccaaactgttcaaaggaaaatttcaactgtgtgagatgaaagcacacatcaaaaagaagtttgtcagaattcttctgtctagtttttatgtgaagatatttatttttcagcataggcctcaaaccactcagaaatatcccattgcagaaagtataagaagactgtttccaaactgctcaatgaaaagaaagattcaactctgtgacatgaatgcaaacatcacaaaaagtttctcaaaaaccttctaactagtttttatgtgaagatatttcctttatcacgataggcctcaatctgctcacaatatccctatgcagattctacaaaaagactgtttccaaactactcaatcaaaagaaaggttcaattctgtgagatgaaatcaaacatcagaaaagaagatgctcaaaaagtttctgtctagtttttatgtgaagatatttcctatttcaccataggcctcaaagggctcacaaatatcacttcgcagtttctagaaaaagactgtttccaaactgctaaatcaaaagaaaatttcaacactgtgagacgaatgtatacttcacaaagaagtttctcacaatgcttctgtccggcttttatgtgaatatttgctttttcttcagagccctcaaaccgctcatgaatatccctctacaaatccttcaaaaagactgcttccaaactgctcaaacaaaacaaatgttgaactctgtgagatgaatgcacacatcatgaagaagtttcttagaaagattctgcctagtttttatgtgaagatatttccttgttcaccataggcctcaaagcgctccaaatatccaattgcacattctactaaaagactttttccaaactgctcaatcaaaagagaggttcaactctgtgagatgaaagcacacatcataaagaagtttctcagaaacatctgtctagttagtttttatgtgaagatagttcctttttcaccataggcctcaaagggctcacaagcatccctttgcagattatacaaaaagactttttccaaactcctcaatcaaaagaaatgttcaaatctgtaagatgaatgcacacatcccaaaggagactctcagaatgcttctgtctagttttggtatgaaaatatttctttttcagcataggcctcaaaccgctcagaaatatccctttgcagattgtacaaagagactgtttccaaactgctcaatgaaaagaaaggttcaattctgtgacgtgaatgcaaacattacaaagaagtttctcagaatgctttggtctagtttttatgtgaaggtattacctttttcaccataggcctcaaactgctcacaaatatccctttgcagattctacaaaaagactgtttgtaaactgctcaatgaaaagaagctttcaactgtgtgagataaaagcacacatcatgaagacgtttctcagaatctttctgtctagtttttaggtgaagatatttcctttttctccataggcctcaaatctctccaaatatccatttgcagattctacaaaaagattgtttccaaactgctcaatcaaaagaaaggttcaactctgtgatatgaaagcacacatcacaaagaagtttctcagaaagcttctgtctgattttatgtgtagatatttcctttttcagaataggcctcagagggctcagaattattccttgcagattctacaaaaagactgtttcaaaacggctcaatcaaaacaaagtttcaactctgtgagaggaatttttccaccactgccctcatagtgttacaaatatatatttgcatattctatgaagagattgtttccaaactgctcaatcaaaagaaaggttcatctctgtgatatgaatgcacacatcacaaagaattttcttagaaatcttttgtctaatttttattggaagatatttctttttcaccataggcctcaaagtgctgcaaatatctacttgcagattctataaaaatactgtttccaaactgctaaatcaaaggaaagttcaactgtgtgagatgaatgcacacatcacaaagaagtttctcagaaagcttctgtctagtttttatgtgaagccagttcctatttcaaccttgtctcaatgtgctccaaatatccatttgcagactctacaaaaagactgtttccaaactgctcaatcaaaagaaaggttcaactttgtgagatgaaagaacacatcacaaagaagtttcacagaaagcatctgtctagtttttatgtgaagatatttcccgtttcaccacagacctcaaagggctcaaaattatccctttccagattctacagaaaacagcttcccaactgctcaatcaaaataaaggttcaactctgtgagaggaaagcatacatccaaaagaagtttctcagaaagcttctgtctagtttttatgtgaagatatttcctatttcaccgtaggcctcaatgggttcacaaatatccctttgcatattctacaaaaagactgtttccaaacttttcagtcaaaagaaagttttaactctgtgtaatgagcgcacacatcaaaaagatgtttatgagaatgcttctgtctacttttcatgtgaagatatttcctatttcaccgtaggcctcaaagtgctcgcaaatatcccattgcagattttataaaaagactccttccaagctcctctatctaaagaaagtttcaactctgtgagatgaatgaacacatcacaaataagtttctcataatgcttctgtctagtttttatgtgaagatatttctttttcaccatagggctcaaaccgctccgaaatatccctttgcatattgaacaaaaacattatttccaaactgctcaatgaaaagaaaggttcaactctgtgagttgaatgcaaatatcataaaaaaagtttctcagaaagcatctgtctagttttcatgtgaagatatttcctttttcatcataggcctcaaagcccactaaatatccttttgcagattatatgaaaagactgtttccaaactgctcaatccaaagaatggttcaactctctgaaatgaaagaacacaccacaaagaagtttctcagaaagcttctgtctagtttttatatgaagatatttcctgtttcaccatagacctcaaagggctctcaagtatccctttgcaattctgtgaagaaagtcattggtatcttgatgcagatggcattgaatctataaattaccttgggcagtatggccattttcactatattgattcttcctacccatgagcaaggaatgttcttacatttctttgtatcctcttttatttcattgagcagtggtttgtagttctccttgaggaggttcttcatgtcccttgtaagttggattcctaggtattttattctctttgaagctatgcagccataaaaaatgatgagttcatgtctttgtagggacatggatgaaattggaaatcatctttctcagtaaactatcacaagaacaaaaaaacaaacaccgcatattctcactcataggtgggaattgaacaatgagaacacatggacacaggaaggggaacatcacactctggggactgttgtggagtgtggggaggggggagggatagcattaggagatatacctaatgctaaatgacaacttaatgggtgcaacacaccagcatggcacatgtatacatatgtaactaacctgcacattgtgcacatgtactctaaaacttaaagtataataataataaaataaaaataaaaataaaaataaataaaaaataagaaaaaaaatacctttgcagattccacaaacagactgtttcccaactgctcaatcaaaagaaatgttcaactctgtgagatgaaagcacacatcacaaagctgtttcgcataaaacttctgtctagttttcatgtgaagatatttcctattccaccataggcctcaaagggcccacaaatatccctttgcagattctacaaaaatactgtttccaactgctcaatcaaaagaaaggttcaactctttgagataagtgcacacatcacaaaaaagtttctcggaatgcttctgtatagtttttatgtgaagatatttctttatctccatagacctcaaaacgctcagatatatcccactgcagatactatgaaaagactgtttccaatctgctcaatcaaaagaaagcttctatgctgtgagaagaaagaacccattataaggaagcttctcagaatgcttctgtctaattttctgtgaagatatttcctttttcaccataggccgcaaacctctcacaaatatccctctgcagatagtacaaaaagactctttctgaactgtgcattcacaagaaaggttctactctgtgagattaatacacacgtcagaaataagtttctcagaatgttctgtctagtttttatgtgaatatatttcctatttcactttaggcctcaaagggctgaaaaatatccctttgcagattgtacagtaagactgtttcagaactgatcaatgaaaagaaaggttcaactttgtgcaaggaatggacacatcacaaagaagtttctcagagtgcatctgtctagttattatgtgaagacatttcttttacaccataggcctcaaaccgctcagcaatatcctgttgcagattgtacaaaaagactgtttccaaactgctccatcaaaacaaaggttcaacactgtgagatgaatgcacactctctttctgagaaacaaagacttttctcagaacgcttctgtttagtttttatgtgaagatatttcctttttcaccataggccccaaagcgctccaaatatccctttgcagattctacaaaaagagtgtttccaaactgctcaatcaaaagaaagattcaactctgggagatgaatgcaaacatcacaaagtaatttctcagaatgcttctgtgtagttttcatgtgaagatatttcctttttcaccataggccttaaactgctaacaaatatccctctgcacataacacaaaaagagtgtttccaaactgctcaatcaaaagaaaggttcaactctgtgacatgaaagcactcatcaaaaataagtttctcagaaagcttctgtctagtttttatgtgaagatatttcatatttcaccataggcctcaatgggcttagaaatatgcctttgcagattgtccaaaaagactctttccaaactgctcaatcaaagaaaaggttcaacatgtgaagtgaaagtgtacatcacaaagaagtttctcagacggtttctttctagttttaatgtgaagatatttcctttttcaccatatacctcagtgggctcaaaaatatccctttgcagatcctacaaaaggcctctttccaaactgctctaacaaaggaaagtttcaactctgtgagatgaaagcacacatcacaaataagtttctcagaaagcttctgtctagtttttatgtgaagatatttcctatttcaccttaggccataaagggataacaaatatccctttacagaatctacaaaaagactgtttccaaacttctccatcaaaagaaaatttcaactctatgagatgaatggatacatcacaaagtactttctcagaaagcttctgtctagtttttatgtgaagatatttcttttttaccataggcctcaaacgtctaagaaatatccctttgcagattggacataaagactgtttccaaactgctcaatcaaaagaaagtttcaattctgtaagaagaaaacacacatcacaaagaagtttcttagaaagcttctgtctagtttttatgtgaagacatttcctatttcaccataggcctcaatgggctcacaaatatccctttgcagattctacaaaaggactctttccaaactgctcaatccaaggaaagtttcaaccctgtgacatgaatacacacatcacaaagaagtttctcagaatgcttctgtctagtttttatgtgaagatatttcctcttcaccataggcctaaaacgctgtaaatatccacttgcagattctacaaaagactgtttccaacctgctcaatcaaagaaaagttcaactctgtgaaatgaaagcacacatcacaaagaagtttctcataaagtttctgtccagtttttatgtgaagatattccctatttaaccataggcctgaaagggctcacaaatatccttttgcatcttctacaaaaagtctgtttccaaactgctcaatcaaaagagaggttcaaatatgtgtaatgaatgcacacatcacaaagaagttcctcagaatgcttttgtctagttttttttttttttttttttttgagatggagtctcgctctgtggcccaggcgggagtgcagtggcgcaatctcggctcactgcaagctccgcctcccgggttcacgccattctcctgcctcagcctcccgagtagctgggactacaggcgcccaccatcatgagaatatttttttctttcaccataggcctcaaatggctcagaaatatccctttgcagattgtacaaaaagactgtttccaaactgctcaataaaaagaaagtttcaacactgtgagatgaatgcacacatcataaagaagtttctcagaaagcttctgtttagctttcatgtgaagatatttcctttttcaccataggccccaaagcgctccaaatatccctttgcagattctacataaggactgtttagaaaactgctcaatccaaagaaggttcaactctgtgagatgaatgcatacatctgaaagaagtttctcacaacggatctgtcgagtttttttgtgaagatatatcgtttttaatcataggccataaactgctcatgaatatccctctgcagatactacaaaaagactgtttccaagctgctgcatccaaagaaatgttcaactctgtgagatgaatacacccaccacaaagaagtttctcagaatgcttctgtctggtttttatgtgaagatatttcctttttcaccataggcctcaaagtgctccaaatatccacttacagactctacaaaaagtgtttccaaacttctcaatccaaagaaaggttcacctgtgtgagttgaatgcacacatcacagagaagtttcccagaatgcttctgtctagtttttatgtgatggtatttcctttttcaccataggcctcaaaccgctcacaaatatccctctgcagatacaacaaaaggacagtttccaacctgctaaatcaaaagatatgctcaacaacgtgagaagaatgcacatgtcacaaagaagtttctcagaatacttctgtctagttttaatgtgaagatatttactttttcaccataggctccaaagcactccaaacatccatttgcagattccacaaaaagactgtttccaaactgctcaatcaaaagaaaggttcaactctgtgagatgaaggcacacatcaaaaagaagtttctaagaaagcttctgtctagtttttatgtgaggatattttctatttcaccacaggcctcaatagactcacaaatatccgtatcagattctacaaaaagactgtttccgaactcctcaatgaatagaaagtttcaaatctgtgaggtgaatgcacacataaaaaagaagtttctcacaatgcttctgtctaatttttatgtgaagatactactttttcaccataaacctcaaaccgctcagaaatatccctctgcagattgtacaaaaagacgtttccaaactgctcaataaaaagaaagattcatctctgtgagataaatgcacaaataataaagaagtttttcagaatgcttctgtctagtttttatgtgaagatatttcctttttcaccatagtccttaaagcgctcacaaatatctctctgcagatactacaaaaagactgtttccaaactgctccatgaaaagaaaggttcaactctgtgagatgaatgcacacatcacaaaaaatattctcagaatgattccatctaatttttatgtgaagataattctttttcaccataggcatcaaacggctcagaaatatacatttgctgattgtacaaaaagactgtttccaatctgctcaatcaaaagaaaggttcagctctgtgatatgaatccacgcatcacaaagaactttctcagaaagctcctttttagtgttttgtgaagatatttcctttttcaccatacgcctaaaagcactgcaaatatccatttgtggattctacaaaaagactgttttgaaactgctcaatcaaaaaaaaaaagttcaaatctgtgagatgaaagcacacatcacaaagcattttctcagaaagattctgtctagtttttatgtgaaagtatttcctatttcatcataggttgtaaagggctcacaaatatccgtttgcatattctaaaaatagactgtttccaaactgctcaaacaaaagaaatgttcaactctgtgagatgaatgcacacatcagaaagaagtttctcaggatgcttctgtcgagtttttatgtgaagatatttctttttcaccttaggcctcaaacggctcagaaatatccctttgcagattttacaaaaagactgtttccaaactgctcaatcaaaagaaagtttcaacactgtgagaagaatgcacacatcacaaggaagtttctcagaaagcttctgttttctttttatttgaagatatttcccttttcaccataggcctcgatgggctcagaaatatccctttgcagattctacaaaaggactgtttagaaaactgctgaatccaaagaaagattcaactctatgagatgaatgcacatatcacaaagaagtttatcagaatgcatctgtccagtttttatgtgaagatatttcctttttcaccataggcctcaaagccctccaaatacccatttgcagattctacaaaaagagtgtttccaaaatgctcaatcaaaagaaaggttcaacacatgacgcaaaagcacacctcacaaagaagtttctcagaaagctgactagtttttatgtgaagatattccctatttcaccatgggccatatagggctcacaaatattttttgcagattctacaaaaagactgtttgcaaactgctcaatccaaagaaagtttcaactctgtgagatgaatggacacatcacagaaaagtttatcagaatgcttctgtctagtttttatgtgaagatatttttttcaccctatccttcaatgggctcagaaatatcccattgaagattctacaaaatgactgtttgcaaactgctccatcaaagaaaagttcacctctatcagatgaatgcacacatcacagagatgtttctcagaatgcttctgtctagtttttatgtgaaggtatttcctttttcaccataggtctcaaagcactccaaacatccatttacagattccacaaaaagactgtttccaaactgctcaatcaaaagaaaggtacaactctgtgaggtgaaagcacacatcacaaagaagtttctcagaaagtttctgtctagtttctctgtgaggataattcctgtttcaccatgggccataaagggctcacaaatatttttttgcagattctacaaaaagattgtttccaaagtgctcaatccaaagaaaggttcaactctgtgagatgaatggacacaacacaaagaagtttctcagaatgcttctgtctagtgtttatgtgagatatttcctttttcaccatagtcctcaaaacattccaaatatccatttgcagattctacaaaaagacgtttccaaattgctcaatgaaaagaaagtctcaactctgtgaggtgaaagcacacatcacaaagaagtttctcagaatgtatctttctaatttttttgtgaagatatttcctttttcaccataggcctcaaaccactccaagtatccatttgcagattctactaaaagactgtttacaaactgctaaatcaaaagaaaggttcagctctgtgatatgaatgcacacaccacaaggaagtttctcagaaaccttcagtttaatgtttacctgaagatatttcctttttcaccataggcctcaaagcactccgaatgtgcatttccaggttctacaaaaagtctgtttccaaattgctcaatgaaaagaaaggttcaattctgtgagatgaaagtacacctcacaaagaagtttctcagaatgtttctttctagtttttttgtgaagatattttctttttcaccattggcctcaaagcactacaaatatccatttgcagattctacaaaaagacgtgtacaaactgctcaatcaaaagaaagtttcaacactgggagatgaatgcatgcattacaaagtagtttctcagaaagcttctgtttagtttttacgtgaagatatttcctttttcaccataggtctcaaagagcttcaattatccatttgcagattctgcaaaaagagtgcttccaaactgctcaatcaaaaaaaaaacgctcaaacctttgagatgaaagcactcatttaaaagaagtttctcagaaagcttctgtctagcttttatgtgaagatatttcctatatcaccaaaggcatcaatgtgctcagaattatccctttggggattctacaaaggagtatttccaaactgctctagcaaaagaaagcttcaactctgtgagatgaatgcacccatcacaaaaaagtttctcagactgtttctgtgtagtttttatatgaagatatttcctacttcaccataggcctcaaagggttaacaattatccctttgtagattttacaaaaatactgtttccaaatcttcaatcaaagaaatgttcaactgtgtgagatgaatgcaaacgtcacaaagaagtttctcagaatgcttctgtctgatttttatgtgaagatatttcctttttcaccataagcctcaaagcgctccaaatatccattttcaggttgtacaaaaagactgcttccaatctgctcaatcgaaggaaatgttcaactctgtgagatgaaagcacacatcacagagaagtttctcacaaagctactgtttagtttttatgtgaagatatttcctatttcaccattggccataaagggctcacaaatatacctttgcagttgctacaaaaatactgttaccaaactgctcaatcaaaagaaagtttcaactctgtgagatgaatggacacatcacaaagtagtttctaagaatgcttctgtctagtttttgtgggaagatatttctttttcaccataggcctcaaacggctcagaaatatccctttgcagattgtagaaaaagactgtttccaaactgctccatgaaaagaaaggttaaactctgtgagatgaaatctctcatcacaaagaagtttctcagaatgcttctgtctagtttttatgtgaagaagtttcctttttcaccataggcctaaactgctccaaatatacatttgtttattctatgaaaagacagtttccaactgctcaatcaaaagaatagttcaactctgtgagatgaatgcacacatcacaaaaaaagtttctcagaaagcttccatttagtttttatgtgaagatatttccttttttaccatgggcctcaaagcactccaaatatccatttgcagatcctacaaaaagagtgtttacaaactgctcaatcaaaagagaggttcaactctgtgagacggaagcacacatcacaaataagtttcttagaaaccttcggtctagtttttatgggaagatatttcatatttcaccatagtcctcaatgggctcagaaatatacctttgcagattcttcaaaaggattgtttccaaactgctcaatccaatgaaaggttcaaaactgtgagatgaattcacacatcacaaagaagtttctcagaaagcttctgtctagtttttatgtgaagatatttcctttttcaccataagcctcaaaccactcacaaacatccctctggagatattacaaaaacactgtttccaaactgttcaataaaaagaaaggttcagctctgtgtggtaaatgcacatgtcactgagaagtttctcagaatgtttctatctacttttaatgtgaagatatttcctttctcagcaaggcttcaaactgctccaaatatccatttgcatattctacaaaaagatggtttccaaactcctcaatgaatagaaaggttcaactctgtgagatgaaatcgcacatcacaaagaagtttcatggaatgttgctttctagtttttatgtaaagatatttcctttttcaccatagtcctcaaagtgctccaaatatccatttgcagattatacaaaaagtgtgtttccaaactgctcaatcaaaagaaaggttcaacttcgtgagatgaaagcacacatcacaaagaagtttctcagaaatgttctgactagtttttatgttaagatagttcctatttcaccataggcctcaatgggctcaaaaatatccctttgcagattctacaaaatgtctgttttgaaactcctcaatcagaagaaaggttcaactctgtgagatgaatgcatacatcacaaagatgtttctcagaatgcttctgtctagtttttatatgaagatatttcctttttcaccataggcctcaaagcgctccaaatatccatttccatattctacaaaaagactgtttccaaactcctcaatcaaaagagagattcagctctgtgggatgaaagcacacttcacaaagtagtttctcagaatgcttctgtctagtttttatgtgaatatatttcctatttcactttaggccataaagggctcacaaatatccctctgcagattctagaaaattctaaaaaaggactctttccaaactgctcaatcaaaagaaaggttcaactctgtgaaatgaatgcacacatcacaaagaagtttctcagaaagcttctgtccagtttttatgtgaagatgtttcccttttcaccatacctatcaacgcgctcaaaatagccctttgcagattctctgaaaagactgtttccaaacttctcattcaaaagaatggttcaactctgtgagatgaatgcacatatcacaaagaagtttctctgaaatcttctgtctagtatttatgtgaagatatttcttttttcaccatagtcctcaagctgctcacaaatatccctttgcagattttacgagaacagagtttccagactcatcaaagaatataaacttttatctctgtgagttgaatgcacaccttgcaaaacagcttctcagaaatattcttatagtttttattgaagatatttcctttttcaccataagcctcagagagctgacaaatatctctttgctgattctacaaaaatactgtttccaaactgctcaattgaaagaatcgttcaactctgtgagacgaacgcacacatagccaggaattttctcagaaacttctgtcacgtttttatgcgatgatatttcctttttctgcagattttacaagaaaatccctttgcagattttacaagaaaagagtttcccatctgctaaatgaaaagaaacgtttacctctgtgagatgaatgcacacattgcagagcagtttctcagaaaccttctgtctagtttttatgtgaagatatttcctttttcaccacaggcctcaaagtgctcacaaatatccctttgcatattctacaaaaagactgtttctgaactgctcaatcaaaggaattgttcaactctgtgagatgagtgcacacatcacaaagaagtttctcagaatgcttctgtctagttttcatgtgaagatatttcctttttcaccataagcctcaaagtgttcacaaatatccctttgcagattcttcagaaagactgtttccaaaatgctcaatcaatagaaaggttcaactctgtgagatgcattcacacatcacaaaggagtttctcagaaaccttctttctagtttttatgtgaaaatatttcctctttcaccataggcttcaaagcgctcacaaatatctctttgcagattctacaaaaagactgttaccaaactactcaatcaaaagaatggttcaactctgagatgaatgcacacatcacaaaaaagtttctcagaaagcttctgtctagtttttatgtgaagatatttcctttttcaccattggcctccaagtgctcacaaatatctctttgccaattctacaaaaatactgttttctaactgctcaatccaaagaatatttcaactctgtgagatgaatgcacacataaccaggaagtttctcagaaacttctgtgaagtttttatgcgatgatatttcctttttcaacataggcctcaaactgctcacaaatatccctttgtggattctatcagaacagagtttccaatctgctcaatgaaaagaaacattaacctctgtgagatgaacccacacatcacaaagcagtttctcataaaccttctttctagtttttatgtgaagctatttcctttttcaccataggcttcatagcgctcacaaatatccctctgcagattctacaagaacaccgtttccaagcttttcaatcaaaagaatggtttaactctgtgagatgaatgcacacgtcacaaagtagtttctcagaaagcttctgtctagtttttatgtgaagatatttcctttttcaccatagacctcaaagcactcacaaatatcactttgcagattgcacaagaactgagtttccagactgattaaaggaatgaaacgtttaactctgtgagatgaatgcagacatcacaaagcagtttctcagaaaccttctttatagtttttatgtgaaggtatttcctttttcaccatggcctcaaagcactcacaaatatccctttgcagattctacaacaacagaatttccaaactgctcataattaatttttagcaccaacatgagcatttagacacactgcttgtggtgcagcacacatgtattatccacactgaaattaggaattcaactgaagttcatgtggagccgaaaatgtgaatatttgggggaccttggagatgatctatctcactttattttttagaaaagaaaacagattcagggaaagggcacgcattgcttaaggtgattcagcagctttggcgcagaaacacaacacacctaaggtgattcatcaggtttggagcagaaacacaatacaatctctgttcttttgtgtctcagatccagaattttttcacaatactgaactacttatgtttctgattccttattttttctttttaagttttgccagtattgtcttatgaagatcctattctttatcctaaatatttaaattcgttaccactattgtctctttataagtaaaattactagttattattataaatgattattcaatcacttttcattttttggtggtccagtacaaagctagtaacaaataaacactattggccttggcaatccaagaggagctcaagtcttccagggcacgtcaggaaaaggctaaatgacagctgtgctgcgagtggacagaatacagctctcatacacattgttgagtatttgatgttcttcaacaatttcattaatcttcagttttttcctctttgaagtgaaagtctgctatgactttcaaatttcttttgaaataattatagattcacaggaagttgcaaaatgtacagggatgtcttaggtactcttcactaattccagtggtgacatctcgcatagccatagagcattatcaaaacctggaaactgacatacgtacaattcagaaagtttactcagatcgcaaccgtttgtatacattcatttttgtatgtgtgtatgtgtgtgcgtgtgttctgtgcatttttatgtggtgtagatctctgtaactaccacttccacagtcaagatacagaactgtagcctcaccaccaggctccaacttgtgatctttgctgacactctgacactttttcctccacaccttccccttggcaaccccatagtctgttctccatctttacaattttatttcaataatttatataaatgtaattgtacaaaatcgaatctttaaagggaaaaacaagtcacagatagttttgtaagtgctgtaaaatagtgtttaacattcatttgttatatgttctatttgtctcaaaaaaatgtgctttgttctttcccatactttctgatatcaggataggaaatcaataccaaacaatacaattccattcatttttttccacagcttggttttcactgttgttgcctaacatttatttttccatttactctttctctctgttttccatcacataaaagtaactttgtgttctttatctcttctaagaaaacttggtaatgagtctttaatgtgacgcctggaccacccttgttttgattttgtgttatgggtattcttttgtgtgatcgttctcatggagagttcttgtgaagctgggcttttccagtggtttgtcaaaatggaaatagatatttaacaaaccaaacacaaaatgaccttgctccagaaatgcatcatttcggagaaaacactacctcttccaactagagattgtgaatattactcatgttatcctttactcccttttattaaaactgtagttttttacacatttgtataactcaggtaatgaaatgtgaaactaagtgattgcctaacaattataattgatgttaacgatgctaccgggaggccacccctacagtggctgtgccaagtctatgtacttgctagctttgctaagttacatgggattgcctatgtactaaatgtaggtgggggactggtctgaggatgcggcagtgccaccctgccccaatgtcgaagctctggatggggcgccaggcaccgtgcggtcaagagatggaggcgggcgcgtgatggcggacgacaccgcagcgcccagggggtcactgccaggggcaaacgaaccctgggaccacggccaggaatgctgtcagacgggccgtgcagtgggctttcagtcccggacacaccgcgtcacatgccgggcaggcgaggggcaggctggcgaggaggactgtgcctcagaggggtgttggggaggaggggcgctggagcggtggtcggccagtcgccaggccgccaccaggggcaagcggtgaactgcggcgacggggacatgctccccaaccctctccccggtggacccttcctacttgccttcccgcccaactagcccccaccactgatgacacacgatgacgatgatggcatgggacctttcaccccaccagggtcaacaaaccctgcacaacgagttgtgtgaggcacgagggagcccccgagggaggaaaccggaccgcgttggtggccaagggaactcgaccccagccagctctattccctctatgttttcgcgggtggtggtgccgccctctctctcttcctcacagccaggagccccccttccccacgccacccaacgcgtgaccacaccgggcctgtgaggggagggggaaggggcaggcacagcaggagaggagggcagacatcaccggtctgcacttgggaggacggagggcaccgacgtgccctgccacggaacccgcaaccgtgcaccctgaggatcccggaggcacccccaggggctattgattggcaagtgacactcagacaggcataaccctgggaggaacccgggccacaagtccattcaaagtgtcaatgatcaatgtgccctgcaattcacattaattctcacagctagctgcattcttcatcaatgcagaagctgagtgatccaccgctaaaagtcatacaaggtcaatttggctagggtgctcccaacaatgtgaggcccacctggcacagcacgtcctccagaggggttacctcagaccggccagtcagacagcaaggggatgagcctccagaaaggggtcagaaggtttcacaacacagggaggtggtgccaaccacgggggttggggggggcgaatgctgacaccaccctacgggcaccaaggggttcctgcccccacagcgtggggcacaagccacatgcgcagcatgcacgcgatagcgtgacggccactgggaaaagcccataccagcgtcagcggcgacacgcgagagcggcacagccccggccggccggggagacggagtcggcgggggaggtgatggaggggcgggcccctcccgaatggactcccccgtgcgcccacgacacccgacccacagatggacaggtgaccccccaaggggtccttaaaactccgctccagaacgcactaggtacctggatggcaggggcggacaaggagcggggtactggcgtccggccccctaccctcgagaagccctagtgggaaggctggggagagccagcgggccgggccgagcccagtggcgcggtgtggcagaggcgatgatggtgccagtggcagcgatgggaacccggccagccccgacaggagcaggcaagatggggccgagccggcaggacagggcgggacgacggcctcggcagggagggcacagagacccacaccccaccgtgacgctgagaaccaccccgtgcctgccaacacacacgtgggggccatggcaggggaccgctccccactgctcaccaggccggcgagccatccagcccaccccacgacacgcacacacagtttcgtccccgcacgcgtgtctctctctaccccctctctccctcccgagttctcctgctctcggggcaggcggggccgtgcaacaaacaaagggcacaaccccaccagcacacgtgctgcacggggaacacggtcggccaaggaggaaggacacgttggcgcctctgtggcttcattctgctccgttaatgatccctccacaggttcacctacagaaactttgttacgacttttacttcctctagatagtcaagttcgactgtcttctcagtgctcggccacggcagtgggctgacccggcggggctgctctgagggcctcactaaaccatccaatcagtagtagcaactggcggtgtgtacaaagggtagggacttcacacaagcctatgacccacacttactgggaattcctcgttcatggggaataattgcaatccccgatcaccatcaccaatggtattcaacaggttacccacgtctgccacgtatggtaggcacacgctgagccagtcagtgtagcgcacgtgcagccccggacatctaagggcatcacagacctgttattactcaatctcgggtggctgaatgccacttatccatctaagaagttgggggacaccgaccgcttgtgggtcacgtaattagttagcatgccagagtctcgttcgttatcggaattaaccagacaaataactccaccagctaaggccatgcaccaccacccatggaattgagaaggagctatcagtctgtcaatcctgtctgtgtctgggccgggtgaggtttcccgtgttgagtcaaattaagccacaggctccactcctggtggtgcccttccaccaattcctttaagtttcagctttgcaaccatactccccccgggaacccaaaaacccaaagactttggtttcttggaagctgcccagtgggtcatgaaaataacactgccgcacgcatcgccagtcggcatcttttatggtcggaactacgatggtatctgatcgtcttcgaacctccgactttcgttcttggttaatgaaaacattcttggcaaatgctttcgctctggtccgaactgcgccggtccaagaatttcacctgtagtggcgcaatacgaatgcccccagccgtccttcttaatcatggcctcagttccaaaaaccaacaaaatagaaccgcggttctattccatcattcctagctgcggtatctaggcggcccgggcctgctttgaaaactctaactttttcaaagtaaaagcttagggccacgggatactcagctaagaacatcgagggggcgccaagaggcaaggggcggggacgggccatggctcgcccgcccgcccgctcccaagatccaactacgagctttttaactacagcaactttaatatacgctattggagctggaattactgcagctgctggcaccagacttgccctccaatggatcctcgttaaaggatttaaagtggactcattccaattacagggcctcgaaagagtcctgtattgttatttttcatcactacctccccgagtagggagtgggtaatttgcatgcctgctgccttccttgaatgtggtagccatttctcaggctccctctccagaatcgaaccctgattccttgtcacccgtggtcaccatggtaggcacagcgactaccatcgaaagttgatagggcagactttacaatgggtcatcgctgccactgggggcgtgcaattggcctgaggttatctagagtcaccaaagccagtggcacctgaccctccagccggggctggagaggggctgactgggttggttttgatctgctaaatgcacgcatcttccccgcgaagggggtcagcgccctttggcatgtattagctctagaattaccacagttttccaagtaggagaggagcgagcaaacaaaagaaccataactgatttaatgagccattcacagtttcactgtaccggccctgcgtacttagacatgtatggcttaatctttgagacaagcatatcgttctggtaggatcaaccatgtaggtagaaagtggcctccgggcctcacgatgatgagcccggcatcccagtcttgaggatgggcccagcagggcgggtgacgggtaatgtgggagggagagagcagcgcggggcggtgggaggggggcggtggggtggcgaactggacatcccatccacccacacgacacaacaccccgtgacgggctcatcactcccgacccttcgagcccacctgccaggagacagacctcccgaccagtgtgtggcagccgcaagggaccggcggccactagcacgtggcgggcgcggggcggcctcgacgtttgggcagcgaaggagaggtggaccgcggtgcctggggtctcatcgtcagcggcctccaagcacgaaggtggccccgcgcggtacctggggcggccgactggcctttggcaggcccgcggctcccccactgccgctgcagtcgcggccagcccacggaaccctcttccctgcccccgctgcaggccgactccaaaccctccgggcgcccaccaggcccacgcggggcgccgccgacctggtcctgaaggcgcgcgcccggggacaggtacaacgggccaaccagtggccggcggcggcgccccacaaggcagagccgggtttggtcccagacggggccaccgcagcctaagccagtgagccactcggggagagaggatccgcgggcggggtaggctgcacagacaggcaaggccagggatcgcgagggcaagggcacccgggagcccgcagaggggcggctcggggagaaacctcaggcacggctgggccaccaggaaaacacggccatgggatctcaccaccacagacacgagggaggtcccgcggcgccccgcctgggatgccggacggccctcggcacccacggagacccgcctctcgagccctagttcccgccatcgggaccccgaagcgacctcagccacaaacccaatgccagggccacgttgctcgtttcttgtccatcctccaacctggtcaagccccccacttgggatgcttcccagggccaggtggcccaaacccgttccatgcaaacgcggtcgtcggccccggtcgctggtccccacgggagcgggcagagagccgtctcacagcagagcagttcatgtgccggatggaatgccgggcacagccaccgctcgcgcagacttccaagcgctaggacgccggcccgtcccggcgggattctcccccgactcggaagggggaggcacgggccacacggtaggcaatgagccaccctcggtccccaccgcggaggccggtggaaccctcgctctcccccactcaccccgtcgagggggaagtggaggagggtcctctccaagcgagttgctatggcagcgctatcataaagcagagagaagtggcaggccggagaatctggtaccccaaaggcacacctctcggatcgctagaaaaggctttctcaccaagggtgggtcacattccctacccgccagtcgcccctcctcgggcccgcagaggcgctcagggatgcctggggaagggagggggcccgcggtaccaggaaaaatctgcttgcggcaaccttgagccttcgtggtctgggcggggggcctggccactgcacgtgggcgcaatcccccaagagctcccccgtcccccagcctcctttctcccaggcaaagcacctccaagtaaacccacacacaacctgtcagaggcagaacagtagcccctcggtggccggccggtgcacgcgtcacctgcccaagcccacctcgatcgctcacacggcccgcacgcacccgccagaggggagcacgagacctgcactcgccagaccaggcggcacccttccccacgtgggggggacgcatctcaaccgcctcgacccccacaccaacgagctccctcaggacgcacttgcgaacactgtggcggcgaccggaggagggggcgcggggggtggaaaccacacaccaccgctcggcctcgggcacttgagggataagctggggggggaagggggggagctgggcgaggtaggctcaagcctgtcatccccgcactttgggaggcaagggaaggtggatccctcgatccgagccttggcaacatggtgaaacctcgtctctaaaaaaatacaaaaagtaactggcttcataacctggacacaaagttaataaatagataaataggccagacacggtggctcacgactgtaatcccagcactttgggaggccgaggcgggcggatcacgggggtcaggagatcgagaccatcctggctaccacttgaaccccgtctctactcaaaatacaaaaaattagccaggtgtggtggcggttgcctgtagtcccagctacttgggaggctcagacaggagaatggcttgaacccgggaggcagagcttgcagtgagccgacatcacgccactgcactccagtctgggcaacagagcgagactccgtctcaaaaaataataataataataaatagattaaaattgaaaattaaaaaaaaaaaacgtagctgggtgggcgcaattgctcacgcctgtcatcccagcactttgggaggccgaggtgggcagatcacctgaggtggccagtttgagacccgcctgacccacatagagaaatgccgtctccaccaacaatacaaaatcagccaggtgtggtggcacgtgcctgtaatcccagctactcaggaggctgaggcaggagaattgcttgaacatgggaggtggaggttgcagtgagctgtgatggtgccgttgcactccagcgtgggcaacaagagtgaaactccgtcccaaaaaaaaaaaaaaaaaattaagcgctgtattctgttatttttacttcctaccctgagaagaacataatacagctgttgtctgtctgcctgcctacctgccggcctgtgacagggcctcactctgtctttcgcccagactggagtgaggtgaaaccattatggctcactcactgcagcctcaacctccccagggttaggtgattcctcaagggatcctacggtctcggcctcccaaagtgtcgggattacagacgtgagccaccagcacccggcctgagttaatacatctggtccctctacatcttaaccacacacccatgaataactcaagtcaagagagagttggtaagagactctcagcattctctcccgaaagcagtgaggtggatggcggccgggtgtcccgagctcctggggttttaggtgaccatgcgtagaggagagatttccagtgtttccagagaggtgtgagccacagtcattggggcatctgagcacgagatggggtttctgacagcgacttaagggccaggaagggccagaatctgtcaaggtccgtgtcccagggtggggctgatggaacccaaggtagagggaatcagcagtctgcacagagagagctccagccccaggccccactgtgcagacccaatcataaggaagagagtcctttgtcctacatgccacatccctccactgaacttgggagcggatccattttccaaatatgaggtgattctcagtttgcaatggatcacatggggctgggcttcccagagtcggcagggtaaataagtcattctggctcggcctcccccatccccttgtaactggtgagggttttttttatttttattttttaattatttttatactttaagttttaggggacaggtgcacaatgtgcaggttagttacatatgtatacatgtgccatgctggtgcgctgcacccattaactcgtcatctagcattacgtatatctcctaatgctatccctcccccctcccccactccacaagtgcccagagtgagtgtgatgtttcccttcctgtgtccatgtgctctcattgttcaattcccacctaagagtgagaatatgcggtgtttggttttttaaccttgtgatagtttactgagaatgatgatttccaatttcatccatgggcctacaaacgacatgaactcatcattttttatggctgcatagtattccatggtgtatatgtgccacattttcttaatccagtctatcattgttggacatttgggttggttccaagtctttgctattgtgaatagtgccacaataaacatacatgtgcatgtgtctttatagcagcatgatttagagtcctttaggtacatacccagtaatgggatggctgggtcaatggtatttctagttctagttctagatccctttgccatccccatcaagctaccagtgactttcttcacagaattggaaaaagctacgttaaagtttaggcctcctagccaaaaagccaaagccacttctgggatttttttcaaagagccagtggttccacaatgggctgtgggtagttgtggaaatggaaagaagtgtttgcagatacatatttgagacagaagggacagggctcggtcacaggtcatgtaggacacgagcagaggcacattgagaaaaccctcccagcatcctaggtgaacagaggtatgcctttttgagacagtcgagggagacacaaccccagattttagggttggatctttattaatatgtagtatctatgaggtatccaagtccagaaatcaactcaccagttctttacagcattctgtagggagatcatatctgggatgtctaaagttaagaattcaggccgtggtaatggattagattagatgtacttgaacttattttgcaaagaaagagagggtgggagatagcgagagccagagagcaagcgagagagacagagacagagacacagagagacagacagagagacacaaagatacacaaagagagaaagacagaaagagagagacagacagataaagacacagagaaagacagagatggacagagagagaaacagaaagaaagatagagacagaaagagagagagacagacagagagagagagacagacagacaggaagaccgacaggcagagaaagagagtaagacagaaggcagacacacacacacaaagaaagagagaaagagacagatggagaaacagtgagaaagagagagacagacagagagaaagagacagagagagaaagacagagacagacagagggagagagagagaaacagacagaaagagagagagacagatggagacagagaaagaaacagacaaggagagagagagacagacagacagacaggcagagaaagacagtaagacagaagacagacagagagagagagagagagagagacaggcagagagagagacagagacagagaaacagacaggcaaagagagagagagaaaaaaaaccagacagacagagagagagagacaaacagagagactgggagagagagtgagacagagagaccgacagacagacagacagacagacagacagagaaagagaataagacagaagacagacacagtgagagagacagagagagagagacagagacagtgagacagagaaagaaagagagttacagatagacagacaaagagacagacagagaaagacagagacggacagagatagagagaaacaaagagagagagagagagacaggcaggcagagaaagagagtaagacagaagacagacacagtgagagagacaggcagagagagacagacagagacagagagaaagaaagagagagacagacagagatggagagagagagacagagagaaacaaacagaaacagagacagagacagagagaaacagacagacagggagagagggagagacagtgacagacagataggcagagagagagagacagacaggcagagaaagggagtaagacagaagacagacacagtgagagagacaggcagagagagagagagagagaaataggcagagagatagagacagagagagagagagaagacagagaagagacagagagacagagagaggaggaggaagggcttgctcaggaaataattacacatattttataacgcttttgatcccataaacggtggcccgggtgtgctttgaaaacaacaacaacaacaacaacagcaacaagagcagcagcagcatttgcttacggatttctagaaaataagatgttctgaagtatagtaaatattaaccggctctcactacacgttgagagattcacaaaagcgctagttaacaacaggagaaaacagcaactaacatgtcttggggaaaatatacgtcttcctgaaaactggggatttctacttcacctgaaaagaaatacatactaaaaaggaaaaacaagaacaaaacaaaacaaaaccacaaacacgggccaaggcaccgtccctggaaatcttaagtgagcaaagtattagttgtcagaaagcgtttctattttgggcaaatactaagaaggcccagactagagctgtgacgccgttcccattgtgaaactatgctggccagagggcgagaaactaaaacatcatgataaaatgtgattgagacccagccagggtgaagctttcctagggagggaggcctgaggaaggaagctggggaaaaccccagaacttcagacccgcccgcttgcccacgcgggtcaagggctatgccatcggtccaagctgtctctggggaagtgggaccatgccaccctcatcttcaaaaacggtggccactgagtgaggcctgacgcccaccgttgcaaatgtcagcctggcaagaatgagatcgccggcaaggggtgttagaaggggagagaagagggaggcgcaccggggtggctccgggtttccaagcagggtgttgggaggcggggagtggggggtttggggggaacccacctaactgattcactaaatgaaggtaaagggacctggggaggggggatccgggggggcaacttgaaaattaaactgacctctcctaaaacccaagtggaagggtcaatgcgcatgaaagaaaccaacacacgaagaaaactaaagcgctgatcaaagaacaatagggcccccgccagggcggaggttccctaggcaacggagggagagagggaggggcctccagaagggagagatagaaacccgttgccccaggcttggtgaagtcagcaagacttccctccgtgtcacctcgactttcaatagcagtggctgctaggtgatgcccgaagacaaccgatgcctgcaagtgtcagtcagcacggaaaagaatgcatttatttatttatttatttatttatttatttatttatttattcatttatttagagacaagtctcactcaatctacagcccgggctgtagtgcagtggcgcgatctcnnnnnnnnnnnnnnnnnnnnggatgacagacgtgagccacggcgcccggccttaaccgtgtatttttaagtcgaggagcttatcagggaaatacgagaagtagggacgccacacgtgacagagagaaaagtttgaaaatgcaccttccatccaagtgggcacccggcctcgacctcctgaaatcatacaccgagtggcgaagcctagcaaggcccatctgtccagattcctctcggcctctctaagcaggcgcttctcactttcgtggaaggggcagggccctccccggcacaggggctctgacagactgacagagaaagagacagacatagaaagacagagatggacagagagaaacaaacagagagagagagagagagacagagacagagagagaaacagggagggagagagagagagacagacagacagacacacagagacaaacagagaaacagagagaaacagaaagagagagagacggagagagagagagaaagggagggagagagagagacagacagacaggcagagaaagagagtaagacagaagatagacacagtgagagaaacaggcagagaaagagagagacagagacagagagaaagaaagagacagagaaagacagagatggacagagagaaacagaaagagagaaagagagagaaacagacagacagggagggagagagacagagagagagacagacagacagacagagagacagagacagacaaagagaaacaaagagagagatggagagagtgagagatagagagagagagagaaacagaaagacagggggagagagacagacaggcagagaaggagagtaagacagaagacagacacagtgagagaaacaggcagagggagagagagacagagacagagagaaagaaaaagacagacagagaaagacagacagagacggacagagagaaaaagcaaaagaagagacagagagagagtgagagcgagagagacagagggagagaatcagacagggagagagagagagacaggcagagaaagagagtaagacagaagatagacacagagagagagagagagagagagaaagatagagacagtcctggcgcggtggctcactcctgtcatcccagcactttgggaggccgaggcgggcggatcacgaggtcaggagatcgagaccatcctggctaacatggtgaaatcccgtctctactaaaaatacaaaaaattagcctgacttggtggtgggcgcctatagtcccagctactcaggaggctaaggcaggagaatggcgtgaacctgggaggtggagctttcagtgagccaagatggcgccactgcacaccagcctgggcgacacagtgagactacatctggaaaaaaaaaaaaaaagaaagagagagacagacagacagaggaagagacagacagagacagacagagagaaacaaacacagagagagacagagagagagagagaaacagaaaggcagggaaggagagagagagacaggcagaggaagagaataaggcagaagacagacacagtgagagagacaggcagagagagacagacagagacagagagaaagagagacagacagagatggagagagagacagagagaaacagacagaaagagagagagacagagagagagtgagagtgagagagagagggacagaaagggagggagagggacagacagagagagagacagatgggtagagaaagagagtaagacagaagatagacatagagagagagacagagagagagagtgagagagagagagagagactcagaaaaagaaatagagagacagagagagagaaacagagagggagggagagatagagagacagacaggcagagaaagagagttagaagacagacaccatgagacaggcagagagagagagacagagacagagataaagaaagagacagacagacagagaaagagacagatagagaaagacagagacggacagagagagacagagataaacagacagagagaagatcctagcccagtagcaatacagtgctttttctttcattttctctttcttttcttttcttttcttttcttttcttttcttttcttttcttttctttctttcatttatttatttatttatttggagacgaagtctcactctgtcgcccaggctgtaatgcagtggtgccatcccgggtcactgaaatctccgcctgcgaggttcaagcgattctcccgcctcaacctcccgagtagctgggattacaggtgcctgccccactgcgcccgactcagtttcgtattttcagtagagacggggtttcaccatgttggctaggctggtctcgaactcctgacctcgtgaaccacccacctcggcctcccaaagtgctgggatgacagacgtgggccactgcgttcagtgtacggtgccatttcttagaaatcactcatgggaatacacacttacaggtcatgtgtagagattttatttatttatttatttatttttatttttattttttttttgcacgggaaggtggggggacagagtttcgctcttcctgcccaggctagagtgcaatggcataggggattcaaggagttaacctatggcagagaagacacgtcattctgagtgtaagggccacagcgaaaagtgtctgggcctgtgcttttaaaggctgaaatcccggcggctcaggcctgtcgtcccagcactttgggaggcccagaaaggtggatcacttgaggtcaggagttcaataccaacgtggccaacatagaacaaccccttctctactaaaaatagaaaaaatagcctgctgtcgtggtgcgcgcctgtaatcccagctaccgaagaagaatcactggaacccgggaagcagaggtttcagtgagccgagagagcaccactgcaccgcagcctgggtgacagagcgagagagactcagtccaaaaaaaagaaaagaagaaaaaaaaagaacaggcccaaatactgcattgtcgctgaatgttcccccaaaaggccggaaaccccctgactcaggtccaggaggtgctgtttcgtttcacttctttctctctctctctctttccttctctccctctctctctccctctctctctctttctcccctaactttcatttcttgttcaaacatacatgtgcaagattgttacataggtaaacttatgacgggggggttcagtgtgcagatgattttatcagccggatactcagcgcagtactcgacagttttcatgttttgttttgttttgttttttcctgaagctgtctctccttccacccctcctccctcaagtaggctcccgcgtctctggtccccctcgttctgcccacacagaactctcatctataagttcccacttatggatgagaacacgcggtatttagctgattgttgctttcatcttcggtggtgacggtgaaagaggcatgacactaaatcgaaccttaggacgctcccctccgtccccaccccacaccccctccccacacacaccctcattcctgcaccctctcctcaaacgcaggaaaggaagaaagacaaattaaagtaagaggtcagcctccaaggcggtggagtcaggggatctcaaagggtgagcaagcgatggggatcgggggatgtcttggctgagcttgcaacaataggcgaccgagtttccagccccaccactccccctaatcctcagccgcagccagcctctgggtggggttgcgcctgtaaaagcttctgaatggagagaagcccaagacgatggaaggcatcagctccaactccaggaagggaatagggctttgtgcatttgaatggggctttagaaggcggtgctgcggcttccaaagtgatgcacctcgccccgcctcgcctcgaccagagcgagactccgtctcaaaatcaatcaatcaatcaatcaatcaaatcataaaaaaaataaaagaaagaaagaaagaaagaaagaaagaaagaaagaaagaaagaaagaattagtacagtggtcgtggtcgtgaatcattccccggagtccaggtgcagtggcttgcgcccgtcacgccagcactttgagacgctaggtcaggagggttgcaacaaaatgatgagaccctgtctgtggaaaaacatttaaaaatgaaggccaggcgcagtgactcacacctgccatcccagcactttgggaggccgaggagggcggatcacctgaggtcgggagttcgagaccagcctgaccaacatggagaagccccgtctctactaacaatacaaaatcagccagatgtggtggcgcatgcctgcaatcccagctactcgggaggctgacgcaggagaatcgcttgaacccgggaggcaggggttgtggtgggccaagatcgcgccattgcactccagtctgggcaacaagagcaaaactctgtcttgggaaaaataaataaataaataaataaataaataaaaatgatctgggcacagtggcgcgtgcctctggtcccaggtactctactctggaggctgaggtgaaatgatcgcttgagtccaggagcgtccacactgcagtgagtgagttatgatggcaccactgccagggtgacagagcgagacgctatctctaaatcagtcaatcaatcaatcagatcactggaaggcactgtctgtgtcttacttccaaagggtgtctctttaggccaagcaggcatggtgcctcacaccagtaatcctggcactttgggaggctgaggagggaggaaagaaggaagggaggaatggaggaaagaagaaaggcaggaaggcagtcaggcaggaaaggaagaaagaaagaaagaaagaaagagagaaagaaagaaagaaaaaagaaagaaagaaagaaagaaagaaagagaaagaaagagaaagaaagagagaaagagagaaagaagaaagaaagaaagaaagaaggaaaaaagaaaggaaagaagaaagaaagaaagaaagaaagaaagaaagaaagaagaaagaaaggaaggaagggagggagggagaagaagagagaagaaaaaagaagaaaagaaaagaaaaggaaaagaaaagaaaaggaaaagaaaagaaaagaaaagaaaagaaaagaaaagaaaagaaaagaaaagaaaacggggaggggcatatctccttgactggtgactgcccaggatacagctgactgaagcctcgacctgtggggcctcaagtgatcttctccttatctcagcctcccgagtagctgcgactacaggcggggatcagcattcaaaaataatcttacaataatattataattattattgagacagagtctcgctctgtctcaataattgccatggcatgatctcagctcactgcaacctcggcctccctggttcaagcaacttgcccgcctcagtctcctgagtagttgtgattacaagcttatgtcaccaggcctggctaattgttctatttttcatagagatggggtttcaccatgttggccagcctggtcttgaattcctggcctcaagtgatccacctgcctcggcctcccaaagtgctggaatgacaggtgtgagccactgtgcccagcgcagataatcttttttataaattgtagagatggagtttcgtcagctgccgggtggagggtggagtgggttttactcagactgcgtactgtgaaagggtaaattagtgtggtttgtgaactagatgtggaaattgtgtgtgtgtgtgtgagagagagagagagagagagagagagagggagagaccaaccccacagtgaggaccgagaaatggtgtttgatttgggtccctgtctagtcacctctctgtctgtagatgactgaggattccacaaatgaaggtcagcagtatctattgagctgtttctccctctcatgcatctcatctgtgtggtggagaaagggaagaaaagagcttctgatgggaagttgtcttcatgcctgaggaagctgaaggtaggctgacgggaaggagggcatcctatgtgacatttccatacctgggtaccctttacaatgctgtggctgccagtccaccctgtacgtcaacccacccccaagaacagcacggtccggggtggtccagtctcatcccatccggcccacccgaggcatctggtggaagtcttcgctggaggatttgaaagcagcgtcaacgcagttcccttggggtcgccgggcaaaggccagccaggggagggtggagggatgtgaaggggggcggggcatcggcctcagaactccctggaaggtggcaggcagccggtgggggacgctgagccagagacgtctggcagtgtatagatctggaagccgcgtcagtcctctcccatacctctcccatggaaaatcccacagaggcggtgggagacttggctgggggagaagcggagacaagggggagagggaaggaggccctcgggaggatttagcaccgaaaacccactcagccaagctccctccctcctatcgggtccaaggtacaccctgggtggtggcaagagaaacgttcaccccgtgctttttgtctttctctttatttttttcatcttttcaattttacaagagatgctcatttcaacaaccagacggtggatgtgttgggagaagtgtcaaggccaggagtttgagaccagcccgagcaactgagcaacacaagtaggagaacccagctgaaaaaaatgaaaaaaagaaggaggaggaggaggaggaaagaaaagaaaagaaaagaaaaacaagcaccaagaaagttaaaattctccaaaggtgcaggcacaaaaaagagtgatttcacgtcttttcccacaacatggatagagctggaagcaagtatgtacccagtgaactgccttctactaacaagtgggagataaacagtgggtactcacacggtcatcatgatggaaataacagacactccaaaggggaggaggagggtaagagggggacaagggatgaataaatcacccgtcggagacaacattcaccacataggtatcggatacacaggaggtccacttctacatccgaaggcagtagtatgccgatctaacaaacaagcacatacaccccctgagtctgtaaaataccaaaacaacaacaacagcaccagcagcagcagcaacaacaacaacaacagcagaacagaagctggaacacaaaaccaccaccaccaccaccaccaccacaaccaccacaatcaccagttgggggttgggggagggtggccgcgctggaggccctcaggctcagtccctcgggtttaaaaaagaaaacagcagactcattcctgtctgtaggcaggaaaaatccaatcaaagttctccgttgctagaaagggaagtagaataaggagaggggcttattgatcttcttgtgatcgatcgaaaccatacatgtaggaaaaaattaaatacagacagcaacactttctacactgtacaaaagcttcggagatcaggcgcaccacactccatggggcttgtgccattagaaagaaaaggcagggccgggccccagtggctcacgcctgttatcccaacactttgggaggccgaggcgggcggatcacgaagtcagggttcaccatcttggccaggctgctctcgaactcctgacctcgtgatccacctgcctcagcctcccaaagtgctgggagtacaggcgtgagccaccaccgccggccgtttttgttttaaaaactacagacaagctgggtgcagtggctcaagcctgtaatggcttcacgttgggaggctgaagtggttggattgcttgagccccggagttcaagaccagcttggcaacatagtgagacaccgtctctgcaaaaaaaagcattaaagannnnnnnnnnnnnnnnnnnnnnnnnnnnnnnnnnnnnnnnnnnnnnnnnnnnnnnnnnnnnnnnnnnnnnnnnnnnnnnnnnnnnnnnnnnnnnnnnnnnnnnnnnnnnnnnnnnnnnnnnnnnnnnnnnnnnnnnnnnnnnnnnnnnnnnnnnnnnnnnnnnnnnnnnnnnnnnnnnnnnnnnnnnnnnnnnnnnnnnnnnnnnnnnnnnnnnnnnnnnnnnnnnnnnnnnnnnnnnnnnnnnnnnnnnnnnnnnnnnnnnnnnnnnnnnnnnnnnnnnnnnnnnnnnnnnnnnnnnnnnnnnnnnnnnnnnnnnnnnnnnnnnnnnnnnnnnnnnnnnnnnnnnnnnnnnnnnnnnnnnnnnnnnnnnnnnnnnnnnnnnnnnnnnnnnnnnnnnnnnnnnnnnnnnnnnnnnnnnnnnnnnnnnnnnnnnnnnnnnnnnnnnnnnnnnnnnnnnnnnnnnnnnnnnnnnnnnnnnnaaaaaggcaagcctagtgctgcatgcctgtagtcccagctactcaggaggctgttgtagaacaatcacttgacccagcagtttgaggctgcagtgagctatgatcatgccactgcactctggcctgggtgacagagcaaaaccccatctcaaaacaaagaacaaccaataacctacaagcatactcagagatagtgtgggtttggttccagacaaccacaataaggcaaatgttacaatcaagctagtcacataaacattttgtttcccagtgcttacaaaagttatgcttaaactatgtgcagtctaatgagtatttaataattaattattaattaattaattagtaatcgcattatgtctacaaaactgtgtacatatcttatcttaaaatatctcattgctgaaaaatactaatgaatatctgagccttaccaagtcataatctttttgctggtgagtgaaggggtggcctgcccctccacacttgtgggtatttctagtcaggtgggatgagagactgagaaaagaagtaagacacagagacaaagtatagagaaacaacagtaggcccaggggaccggcgctcagcataccaaggacatgcaccggcaccagcctctgagatatctcagtttttatggcttattattttcattatttcagcaaaaaggaatgtggtaggagagcagggtgataataaggagatggtcagcaaaaaacatgtgagcaacatgtctcgcctccccccatagggcagtttttctcctatctcagaattgaacaaatgtacaatcgggttttatactgagacattcagttcccaggggcagccaggagacagtggccttcctctatctcaacttcaagaggctttcctcttttactaatccacctcagcacagacccttaacgggtgtcgggctgggggacagtcaggtctttctcatctcatgaggccatatttcagactatcacatggggagaaactttggacaataccccgctttcaatggcagaggtccctgcggctttctgcagtgcattgtgcccctcgtttattgagactagagaatggcgatgacttttaccaagtatactgcttgtaaacattttgttaacaaggcacatcctgcacagccctagattccttaaaccttaatttcatacaacacatgtttttgtgagctccaggttgagtcaaagtggctggggcaaagttgctggggcaaagctacaaattaataacatctcagcaaagcaattgtttaaagtacaagtctttttcaaaatggagtctcttgtgtctttcctttctatatagacacagtaacagtctgatctctctttcttttctctacagtgagggtcttgcctctatgttgatggctgttgactgatcagtgtgggggctgctgaagtttgggtgcctgtgtcaatttcttaaaacaatgaagtttgttcctttcacaaaagatttccttgtagcatgtgatgctgtttgatagcattttatccacagtagaacttccttcaaaattggagtaaaccctctcaaaccctgctgctgctttatcaactaggtttatggaatattctaaattctttgttgttatttcaacaatgttcatagcatctccacctggagtagattccatctcaagaaaatattttctttgcttatccataagaagcaactccccacttgctcaagtttcatcatgagtttatggcaatttaacctcatctaaaggccctaattctaattctggttgtcttgcgatttctaccacatctgcagggacttcctccactgacatcctgagccctcaaagtcttccaagagggctggaatcaacttcttccaaactcctgttaatgttgatatttcaatctcctcccacaaccacaaatgtccttaatggcatttgctattaaggacatttgtgattcatgggaataggttggaatatcatgaagggattaatggtgaaacctttccaaaaggttttcaattcagtttatccagattcatcaaagaaattactatctatgacagctatacctttacaaaatgcattcattatttaataaaaacacttgaaagtcaaaaccaccccttgatccacaggctgaaggatagatattgtattagcagccattaatttccaagtacatctccatctaagcttctgggtagctaggtgaattgtcaataagcagcaatctttttacatttttcttttcttttcttttctttttttttcctttatgtagtttccctcttgctgcccaggctggagggcagtggcatggtctcggctcactgcaacctccgcctccagggttcaagccattcttctgcgtcagcctcccaagtagctgaaattacaggtaccaccaccatgcctggttcattttttttttttttttttttgtatttttattagagacagggtttcatcatttccaccaggctggtcttgaattcctgacctcaggtgatccacccacgtcagcctcccaaagtgcagggattacaggtgtgagccactgtgcctggccaagcagcaatccctttaaaggaatcgtgtttttttttttcttttttcttttttttctttatctgagcagtaggtctcaatagtgggattaaaatattcagtaaaccatgctcttaacagatgtgttgtcactcatactgtgatgttccatttctagagctcagcaagaatagattttgcataattcttaagggccctgagattttcagagtggtcaatgagcattggctgtaacttaaagtcaccaactgcagtggtcctcaaagagagtcagcccatcctttgaagttttgaagccaagtgttgacgtctctctagcgatgaaaattttacatcttcactagcttaatcatttctagctctggacttcaagtgagagacatgcaattcttcctttcatttgagctctttgaggccactgtgcttactaattaacacccccggtgggtgtcatcctcctccctcctcaatcgagttcacccacaccggggcgtggggaacggggcttcccacaccccacattccctgcacgactggggctctcccacagggggctttcgtgagcgagggagcaaaggccattcctccgctccagcctagccaggctgcgcaggcaggaggaatctctcaacctaccccggcacgcgggggattttgcgttcgctgccctcgctcctctagaagtaggactgttccaccctcagactcctaggtggcctccacaccccaacaaatgccaggaggaccagaacccgcagcatggtggcctgctgggcgcgtgctcagtgggacagcttgggtcctctgaagctgagtcacaggggcaaggtgtgtttgcgccacccacgtcccaccggagtccgcggtggggctggagccccaggtcgccagggctgcgtgggaaacggaagacggggcacctccacttccgaagctcgagaccccggaggcctccgcgtcaagcacatatgcaagccatccgggcgccgcccaaccgctccaggagccggggctctcgtctacattcacccccagccagttagatgagctcctgtaaaccccacagtttcagcacaaggcacaacctttcctagatccggcgccactggggtagctgaagaacgtggaagagccctctccgctggaaccactcctcagccaggaagaacaccgggctctgctggaggagctttaggaccgggggttggggcggggtaggggcagggcggcggcctctctttcgcggtgaacctctgacttggtatagagaggcctgtcttccctttcagctgacctgcctaggatccctgagttccaggtcccgtgagggatccactcagaggagggctgtcattcttttctgagcatcccggggatcccagggcccgtccaggtaccgggagacggactgtctactgctcatgcgcgggttagcaggcagtagcctaggttttctatccctcttgccccccaccgcgttcttcagtggggcaggcggagacctccatcccggcaaacactggcccgggcaggcgccaggcctgctcttctttccgcgtctcgccacctctgcctccccgccccaccgtcactcgcctacccttgccccaccagcttcctcggcatcacctggagtgcctgacagctaaatgcagactcgagaccccgtgaaaaccagggtgctgccctttctacgcaggagggaactcaggcagagaggaggagaggaacggagacagagagggagggagcgatggagggaggaaagaacggatggaccgagggaccttggaaaggatggagggatagaaggaaggagagagggaaggaaggagggagggaggaagggaggaactgagggagggacgcagggaaaaagggaaggagggagggagggaagaagggaggaactgagagagggacggagggaaaaagggagggagggagcaagaaacagagagaggaaggcagagaaaaaagcagtcttctgcctccaggaccagcaggatctcgcactccgggaaaatgttgggtgcccagtgcaggctaagtgctcggcctacagccgcgtcggcctgcggggctctcaccggccctctggatcgccagcctgggttacttcatcccggagcgattcagacgaatttcctctctcaaggaatgagcgaattgcccagagagcaatgagccgagactcgggtgattgtccatttttcatccacgtggttcacagatgagatagccccacgttgagcctgcaacggagcgcgaggtggatagtcccgtacacacaggagtcacactcaggccgactgaagcgtggtttcgggttccacgttcctttgtcttctgcaagggggcctgttgttcatgcgtctctggcccccgaaagggtgaccatgttgattgtttgtttcccgagctctgtggggacacagaaacctccagagaagcatggaaaagcagcatcgtgtcttcgctctcctttccagtttcctgtttggaaacaggtcctagtggagactccctatgtcgcaggaaacaggaatccatcgtcaggccgtgatgcaccgggtgtttcttttctctgtagtttcgctctcgttttctacatgaaaatgaacgagatccgtaaggaatcagaaaaggatttatagcacacaagtcttgactactgttacattccactttgaaatcactctgaggcgaaacaacaattttccaagatttaaagaaaaatagattttacaaaagggattcttttattcactcaatacatcatttatgttactgacagtaacaagtagatattttttccactataatttgctctgatgaaataaataattcttttaattcctaacaaatgctacattttcaagactaaaggaattatcagtaggcattctttcttcttgatctaagttatttgtctctaaaatatgtcaagtaagcttttaaagattcagggagagtcagcttcatgattttttctgtcagtaaattttgaggtggctcttctggcttcatcgcttcactgtgatctttttcttcctcttctttgttatcttcttccattttttcatcctcctcactgtctagaggctgaggaataagctgattacccacaaatacgtaagtggtaattctctgtttaactctttttcttttccttttgggtggagccctttgaggaatccccttggcctgcatctcatcatttatgaaatttctaagtgtgcgtcgaatgtaaatacgagccaagtcctgtagattcctgacagtgattccttacagaactgtaggggtgagggttagatttaattttatataaggtttaaataattgttaagcttatgtaacctgatctgaatttattagataaatgaaaacttcatttatctaataaggaaatcaaatgctttgtagatctatttaccttacttttgttgcaatcactattgctgggttgctgtatatatattccgggcaatatatgagtgcaataacaattcaaaatattgaataatttagcttttaaaaaatcccacaaattttatgaaattttacagccctgctacttttgcttttgaatctcttgccaaaagacatgagtaaaatatctgcttctctcatagagattttaagagggcagcaagtgaattattaaaataggaaatatatacttaatacaactctttatatggaccctttacattttcaatattttaaaaaatgaggttaccttaactctctagaatttttaaagtatatttagaattgttttttctgtatttcactgtataaagtatttgtttttttaaaaaagcaaaaccattgttatgtgtgactcttgataggccacagaacgagtgaatgagcatgagtaaagccactttcttagacggctgtaagtagcagggccatggtagagctgctcagtgtatgcactttagcagatggaacttctagtttatctgaatatttatctttgacaaggtagggctgagcctacatttgctttggatatttctagtacaagaaatattcacagaaattgtatgtagataccctttgtttagaaaatcctgttcagaatcatagtgtaatctttgggacttacgccatgctcatttgacttcttcctatatttttttatgtttcttttggtaaaactataatggttttcatttcttacttaatatcatacaattatactgtcatatttgagcattattgtagcttaccggtgataaaaaaacaggtagtaactgccattgtttgtttctttgttttcctaataaggcctgaaaacagccattccttgttaagaaagtgtgcaatgcaacgtatttgctagagttacatggattatatatttcttaaagggaaaaatttgagagtatcagggattaccactagcattattattatagtagttgctcagatttggttaaggaagcccaatcaatgtatggtgaaaggattatttgctctctgctaagattcatatattgtttcaaaaatctcagctccaataattccacaacatctaaaaacaagtgtttgtgatcatgtgtaagcatgaaactgttccaagtaagtgaggatattttagttatgtgaaagacagtatcaatggaaggttatttgttttataccagtggctgggatggtcgaattgggattatttctacagttattcttagatgattactaaactgttaagaaatgccccatatcatttgtatctaggaaagaaaaaatcagtatcatgctgttgtcatctgtcagaaatattcattttattttcaattaaatgtggcttttgaagttaccttgaattcctggtgaccacatgtttttatctggaaaacctggggaaagttatctgtcccatctatcctgctgttttattttttttttattttttatttttttcttggttggagctgctgtttagatgatgcttttactatgtaggagagagtttttgttaaggatatatttgaagaatggcttttcaatattgtctttcattctttgaccttggcaaagtgtacagtagattttcatgatcattgcatatttcttgtcattgaaatgcatcttttatgtttttaaatgcaatcactttacacttgtgactttatcattgactttaagaggtagaaataaaaaatgaaaataaaaaaagaaaatgaatgagatccacacacctgcgtgtgtgagactatcatggcaacggcgacacccacaggcattgccaccttcagggagagggtctggaaaactcaagactatcatggaggttcagttccacactccacccttccagggtggtttctccctgaaatcttgtgtgagcccagagataaacttctagtttctgtagaattgtggagaactcagagagccagccccagaagcccccctttccctgccgatctggccccaccttcacctaccacacaaggccctgtgtctgtggtttctgggaccttcggagggcgggttacccagggcccttgggtgctcatgcatattcatgaaggggtgaagctggtgggtctttataagggccactggcggggttggactcctgcctggacctgcgtgcaacacagaggccaactgaggtgcactggagccgccggcctctctctgcccgtgtctatccatgaaattccggccaggtgccctcgtgatggctctcccgacaccttctgacagccccttccccgcggaagcccgagaacgaggacggcaaaggagactcgtttgtaacctgaatgaaaaagatgccctgccagcgtgctttgagcagaacccgtacccgaactggccagagagacctgccttttggagtccaggattcagatttcgtgtcagaatcgaaggtccaggcatccaggccagggtggcagggaactcgcgcacgcaggcggcctgtgcaacgcggcccacagcgggtgccaccctctctccttggtcaccttcacccacgccagggcgtggggaacagggggctttcgtgagccagacagcaagggtcgcccctctgctgcagcccagccaggcttcgcaagcagaaggaatctcccaacctgccgtggcacacggggattttgggtttgctgccctggctccttcggaagtggcgctgtcccaccctcagacacctgggtgacctctgcatccgaacagatggcaggaggactaggacccgcagtacggtggctttctgggtgcgagctcaatgggatagcttgggccactgaggctcaaggtgtgcttgcgcctcacacgtcccacatgagtccgtattggggctggggccagggtccacaggtcgccagggcgcgtgggaatgcgaagcggaggcacatctacctccgcagctcgcgctcatggaggcctctgtgtgtcagaagcagatgtaagccatccaggcaccctcccaacggctccaggagctggagtcttcatctgtactcgcatccaccctgttatatgagttcctgtcgaccccagaatttcagcaaaaggcataacctttcctagcaatggagccgctgggggagttgaaggacttggaagagcccgcttttctggaaccactcctcagccaggaagaacactgggctcagctggaggagctttaggacgggggttgggaccgggtgggggcagggcggtggctcctctttcgtggtgaacctctggctccgtatggagacctgtgtcttcccttccagctgacctgtctaggatccctgagtccaggcccggcgagagactccacagaaaggagggctgtcattctttcctgagcatcccaaggatttcagagccagcccaggtactcagagatgggccgtctactgcgcatgcgcaggtccgcgggcagctggctagggtttgggatcagcccaggcagggctctcatcccttcccccgcccccccacgcagtacacccccctgcccccatgttcttcagtggtgtaggcggagaccttcatcccgggaaataccgacccgggcagcggccagccctgctctcctttccgcagctcaactccactacctccccgctccaccctccctcgcccacccgtgccctgccatcctcctcggcatcacgtggagcgcccagcaactaaatgtagaccccgagatctcgcgcaaaccgtggttctgccctttccaggcgggagggaggccaggcagagatggggaaaggaacggagacaaagtgagagagagggacagagggaggaaaggacggaccttggaagggaaggagggagggagggagggaaagaaaaagagaggaagggaggaagggaaggagggagaaagggaggtatgcatggtgggaaagagggaaggagagaagaacagagggagggagggagacagggagggagagagggagagaaggaagaacagagggaaggatggacagagggagaaaaagagcgagaaacagagaaaggaaggcaaagagaaaaacagtcttctgcctccaggaccagcaggacttcgaactccgggaaaatgttgggtgcccagtgcaggctgagtgctcagcccacagcctcgtcggctggcggtgcgctcaccgaccctcgggattgccagcctgggttacttcatccgggagcgattcagaggaattccgcctcccaaggaatgagcgaattccccaaagaacagagccgagactcgaatggttgtccgtttttcatccacatggttcacagatgacatatccccacgctgagcctgcaacagagcgcgaggcagatactcccatccacacaggagtcacactcaagccgagtgaaccatgattccggattccacgttcctttgccctctgcaagtgggcctgctgctcacgtgtctctggcccccgaaagcgtgaccgtgttgactgtttgtttcccgagctctgtggggcacagaaacctccagcgaagcgtggaaaagcagcatcgtgtcttcgctctcctttggtttccaaacaggccactttggagactccccatgttgcaggaaacaggaatccttcatcaggccgtgatgcctcagtcccctgcccaggctcaaggcccaccaggcggcctccctttcgctggcactccaggccttcccccggctcgcgagctcctgagtttccaacacatctggctggctcaggacagggtgtgcttgcaggcgtcagggcccggggcccacagtcctgggatcccctctggtcttccgccttgcagcggaaaaattgttttggatccctcgcacccctcctgcaaggccccctcttggcccacacacccagagccgtcagggctgcccaggggcgaacagcagcccagccctgcgggccctttttctcacaaggtccacaccatcgtcgcttgtcccgaagaggacctaccagtggccaacgggacaggaaggcactgctttgccacgcgctggcactagagccctggcagcctgatccccgggaaagaggggctgagggacacccagacacaccccaccactaccacgagcaaacccatcccgacacacacacaggtacacatgggtgcatgcacacaggcacacatggacacacacacacggacatacacacatggacacacaaagacacacacacggacacatggacacacgcacacggacacacacggacacacacacaaggacatacagacaaagacacagacacagcttgaaagagagctaaggagactgggatggagagatacaaatggggggagagagagaaaaatggagggggagagagacagaaggtgacagaagagcgagagttggagggggaagtagagaaagagagagggtgagggagttgtagagagagagagacagagccttggagagggaggctctgctcaggtagacagggcactttgagcaggccggggtgaggtggagggtgcttgggccagggtagaacagggggtcagggccacccacgcgggaaaaccaacggagccctgagacgtgttttttttttcttggattggttggttgctttgggggtgcgtttcatagggtccttcctttgtttgcttctttctgtctccttgatgcggtgggccccgagatttgtagagtgcaccggtccatctggtggaagccgtggcaccgagcgtgtccacggggccaggtctgggtctctctcgtgtcctcgggactagagtttacacgacgttggtggcaatgggaaacagggtgcacagggacggatttcttcgtggctggcgaagacaatgtccttcccccgggaaagcagcccaccggttctggagcggaggtcttggctggcgactgtgggacctgctgccccaacttggatggttgcggcggcgcttgatgaatgagttgaattgcctggggtccggggagcaggaagacaccccggagggcaggaaatccgcgcctgtgccttccaggtctagtacctgctgcagcgccccggctggagccgggctcctggtggggctgcagccaggcgaaagaggtgggatgctgccatctggcggtattgccgctgcagacccccacgaggaagtttcatctcgacataaatctttttctttcttcagctgatctgtatccttaattttagattagtggtaactccacaaatttagaggcacaaaatatggttgcccacaccttataatcgcattaccacctcccattaccaccacctttccccctcctccccaccttcaacccgtagactaggtctcgcgatgtttccaaggctggcctaaaactcctgggcttaagttatttgcctgccttggcctctcaaagtgctgtgatcggcggtgtgagtcaccatgaccagccaaccaccaccaagttttgattcagtagcactgggttgtggagctaaggatccacaaatttagaaaagtttttaaatatcataacgtttctgtgtggaaatagtatttggtattacatttttagactcttttataatgttctgtttttttccaccgagcagaatactaagtagtaattggaaaatcacagcataagtcatattaatttttttaatacagagtccttggctcttctctaagctaaacctgatcacctatattgagtaaaagaaaaagccccagagtgtgaagagacaggggatagtagccaaacatccaaataggtgggagtgaataaggcagatgacagagatgagatgtccaaaggtcaaggagaaagccagatcttaaagtgtggtttgcgaagctatgcttcaatggaaatcttttctgagaagccctgatttatttctcttgctttcgttaaagactgacatcctctgccccatgctcttcaattttctaggactgaacttccccttcaacgatcattcttctaggttacaaagaaaatcaaagccctttgcatggcttataagggactggaggacatggttgcttgctcttttattgcttttgaggacatggagctgtctgtgatttttaaggaactctatgataagcattttctaatttccattttgagtcttgtctaaaatgtgtgagagcagtggagatattgggatttggtttagaaatcacagaaacaccatatccagatgtcgtaacttttctgctttataatttcatatcctgtgaaggtttcaaaagtgattctacagaaattcatactcaataattttatcagaatactaagcatctgccccatataataaaaccaaatgttattttacttcaaaattttaagtttttggtatgtattgaggctaatactgtaaacactctgtgccataattcctaaactgtaatatggtttaatgtatctactttctacatttaaaacgtgtactttgccattgaggaactcaaaatattgttgagcatgtattaaatacccatttgtttcctgatttttaaatagttatcattttacaattttgccttgcttagtttgaagcttactaggattttgtcattgatatgtgtgtgtgtatatatatatatatatatacatacacacacacacaattatatacataacaacatatgtaattgatatatatgtatatgttttatatatgtctatatacacacttatatgaatatatgcatgtgtacataacattaattttttggccaataaaaattgcataattatgtattgtgtacattataaaaatttgatagatatatattgtaaaatgtttaatacaattaagttgatgaacatttatgtcacctcacatggttatgttttttgtagtgagagcatttgaggtctcctactgttgtagcaaattttaagcatacaaaacactgttattaactacatcttaaagctgtacattagacccccaaaacttatttatcttataactgaaagtttgtactctttgaacaccttctcattttttctacctccaggcctggtcattaccattgtactctctgcttctataagttcaggctttttaaattctccatttaagtgcgaacacacagtgtttgtctttctgtgcctggcttattttacgtagcataatatacccaggtccattcatgttgttgaaatagcagaatttcattcttttttatgggtgaataatattcggttgtctatttataccacattttccttatccattcagcatctacagataagtcatttttaaaaaaaaatatccttgacagttgtgaataatgctgcattgaatacaggagtgcagataatttttgagatgctgattttattttgtttatttagagaagtgaaatttcgggattgtacgatattctattttttaaaataaactgtgtgctaattttcatgactcttccagtctgcaactcattaagactgtacagaaatattttgtcacatccttgttaacacttgtcatgtttctttttttgatattagccattccaactgctgtaaagtggtatctttttatttgcaattttctcatgaatggtaatgtttagcatctttctacatatctcttggccatttgaatatgtttgtataaaatatttagtctcggtcagtggagccaagagggccgaataggaacagctccagtctacagctcccagcgtgagtgacacagaagatgggtgatttctgcattaccaactaaggtaccaggctcatctcactggggagtgctggtcagtgggtgcaggacagtgggaacagcacaccgcgcatgagccgaagcagggtgaggcatcacctcacctgggaagcacaaggggtcagggaattccctttcctagtcaaagaaaggggtgacagatggcacctggaaaatcgggtcactcccaccctaatactgcacttttacaacctgcttcacaaacagcacaccaggagattatatcctgcacctggctcggagggtcccatgcccatggagccttgctcattgctagcacagcagtctgagatcaaactgcaaggtgacagtgaggctgggggaggggctgccaccattgctcaggcttgagtaggtaaacaaagcagccaggaagctcgaactgggtggagtccaccacagctcaaggaggcctgcctgcctctgtaggctccacctctgggggcagggcacagacaaacaaaagacagcaataacctctgcagacgtaattctccctgtcccacagacttgaagagagtagtggttctcccagtacacagcttgagatcagagaatgggcaggctgcctcctcaagtgggtccctgacccccgagtagcctaattgggaggcaccccccagtagcggcagactgacacctcacacggccgggtactcctctgagacaaaacttccagaggaaccatcaggcagcagcatttttggttcaccaatatccgctgttctgcagccactgctgctgatacccaggcaaacaggttctggagtggaactccagtaaactccaacagatcagcagctgagggtcctgactgttagaaggaaaacacaaacagaaaggacatccacaccaaaacccatctgtacgtcaccatcatcaaagaccaaacgtagataaaaccacaaagatggagaaaaaacagagcagaaaaactggaaactctaaaaatcatagcacctctcctcctccaaaggaacacagctcctcaccagcaacggaacaaagctggatggagaatgacgagttgagagaggaaagcttcagaagatcaaacaactctgagctaaaggaggaagttcaaaccaatggcaaagaagttaaaaactgaaataaaattagacaaatggataactagaataaccaatgcagagaagtccttaaagtacctgatggagctgaaaaccatgacacaagaactacgtgacgaatgcacaagcctcattaaccgatgtgatctactggaagaaacggtatcagcgatggaagatggaatgaatgaaatgaagcatgaagagaagtttacaggaaaaagaataaaaggaaatgaacaaagcctccaagaaatatgggactatgttaaaagaccaaatctatgttgcattggtgtacctgaaagtgacagggagaatggaaccaagttggaaaacagtcagcaggatattatccaggagaacttccacaatctagcaaggcaggccaacattcaaattcaggaaatacagagaacgccacaaagatactcctcgagaagagcaactccaagacacataattgtcagattcaccaaagttgaaatgaaggaaaagatgttaagggcagccagatagaaaggtcgggttacccacaaagggaagcccatcagactaacagctgatttctcagcagaaactctacaagccagaagagagtggggaccaatattcaacattcttaaagtaaagaattttcaacccagaatttcatatccagccaaactaagcttcataagtgaaggagaaataaaatattttacagacaagcaaatgctgagagattttgtcaccaccaggactgccctaaaagagttcctgaaggaagcactaaacatggaaaggaacaactggtagcagccactgcaaaaacatgccaaattgtaaaggccatcgaggctacgaagaaactgcatcaactaatgagcaaaataaccagctaacatcatactgacaggatcaaattcacacttagcaatactaaccttaaaggtaaatgggctaaatgctcgaattaaaaggcacagactggcaaatgggataaagagtcaagactcatcagtgtgctctattcaggaaccccatctcacgtgcagagacacacacaggctcaacataaagggatggaagaacatctaccaagcaaatggaaaacaaagaaaggcaggggttgcaatcctagtctctgataaaacagactttaaaccaacaaagatcaaaagagacaaagaaggccattacataatggtaaagggatcaattcaacaagaagaactaactatcgtaaatatatacgcatccaatacaggagcacccagattcctaaagcaagtccttagtgacctataaagagacttagaccaccacacaataataatcagagactttaacaccacactgtcaacattagacagatcaacaagacagaaagttaacaaggatatccagtaattgaactcagctctgcaccaagtggacctaatagacatctacagaaatctccatccccaatcaacagaatatacacttttcagcaccacaccacacatattccaaagatgaccacatagttggaagtaaagcactcctcagcaaatgtaaaagaacagaaatcataacaaactctctcagaccacagtgcaatcaacctagaattcaggattaagaaactcactcaaaactgctcaactacatggaaactgaacaacctgctcctgaatgactactgggtacataacgaaatgaaggcagaaataaagatgttctttgaaaccaatgagaacaacgacacaacataccataatctctgggacacattcaaagcagtgtgtagagggaaatttatagcactaaatgcccagaagagaaagcaggaaagatccaaaattgacaccctaacatcacaattaaaaaaactagagaagcaagagcaaacacattcaaaagctagtagaaggcaagaaataactaagatcagagcagaactgaaggaaatagagccacaaaaaacccttcaaaaatcaatgaatccaggagctggttttttgaaaagatcaacaaaattgatagactgctagcaagactaagaaagaataaaagagagaagaatcaaatagatgcaataagaaatggcaaaggggatatcaccactgatcccacagaaatacaaactaccatcagagaataattcacctctatgtaaataaactagaaaatctggaagaaatggataaattcctcaacacatacaacatcccaagactaaaccaggaggaagttaaatctctgaataaaccaataacaggctctgaaattgatgagataattaataccttaccaaccaaaaaaaatccaggaccagatggattcaaagcgaattccaccagaggtccaaggaggagctggtacccttccttctgaaattattccaatcaatagaaaaagatggaatcctccttaactcattttatgaagccagcatcatcctgataccaaagcctggcagagacaaaccaaaaaaaagcatattttagaccaatatccttgatgaacattgatgcaaaaatcctcaataaaatactggcaaaccacatccagcatcacatcaaaaagcttatccaccatgatcaagtgggctttatccctggggatacaaggctggttcaacatacaaaaatcaataaaggtaatctagcatataaacagaatgaaagccaaaaaccacaagattatctcagtagatgcagaaaaggcctgtgacaagattcaacaacacttcatgctaaaacctctcaataaattaggtattgatgggatgtatctcaaaataataagagctatctatgacaaacccacagccactatcatactgaatggacaaaactggaagcataccctttgaaaagtggcacaaaacagggatgccctctctcaccactcttattcaacatagtgttggaagttctggccagggcaatcaggtaggagaaggaaataaaggacattcaattaggaaaaacagaagtcatattgtccctgtttgcagatgacatgattgcatatctagaaaatcctgttgtctcagccgaaaatctccttaagctgataagcaacttcagcaaagtatcaggatacaaagtcgatgtgcaaaaatcacaagcattattatacaccaataacagacaaacagagagccaaatcatgagtgaactcccattcacgattacttcaaagagaaaaaaaatacttaggaatccaacttacaagggatgagaagaacctcttcaaggagaactacaaaccactgctcaatgaaataaaagaggataaaaacaaatggaagaacatcccatgctcgtgggtaggaagaatcaatgttgtgaaaattaccacattgcccaaggtaatttatagattcaatgccatccccatcaagctaccaatgactttcttcacgaattggaaaaaaaacactttaaagttcatatggaaccaaaaaagagcctgcattgccaagtccatcctaagccaaaagggcaaagctggaggcatcacgctacctgatgtcaaactatactacaaggctacagtatccaaaacagcatggtactggtaccaaaacagagatatagaccaatggaacagaatagagccctcagaaataatgccacatatataaaactatccgatctttgacaaacatgacaaaaacaagtaatggggaaaggattccctatttaataaatggtgctgggaaaactggctagccatatgtagaaagctgaaagtggatcccttccttacacattatacaaaaattaattcatgatggattaaagacttacatgttagacctaaaaccataaaaacactagaagaaaacctaggcaataccattcaagacataggcatgggcaaggacttcatgcctaaaacaccaaaagcaatggcaacaaaggccaaaattgacaaatgggatctaattaaactaaagaccttctgcacagcaaaagaaaccacaatcagagtgaacaggcaacataaagaatgggagaaaatttttgcaacctactcatctgacaaagggctaatatccagaatctacaatgagctcaaacaaatttacaagaaaaaaacaaacaaccccatcaacaagtgggcaaaggatataaacagacacttgtcaaaagaagacatttatgcagccaaaaaacacatgaaaaaagctcacgatttctggccatcagagaaatgcaaatcaaaaccacaatgagataccgtctcacaccagttagaatggcaatcattaaaaagtcaggaaacaacaagtgctggagagcatgtggagaaataggaacacttttacactgttggtgggactgtaaactagttcaaccattgtggaagtcagtgtggtgatccctcagggatctaggactagaaataccatttgacccagcaatcccattactgggtatatacccaaaggactataaatcatgctgctataaagacacatgcacacatatgtttattgcggcactattcacaatagtaaagacctggaaccaacccaaatgtccaacaatgatagactgaattaagaaaatgtggcacatatacaccatggaacactatgcagccataaaaatgatgagttcatgtcctttgtagggacatggatgaacccggaaaccatcattctcagcaaactatcacaaggacaaaaaactaaacaccgaatgttctcactcataggtgggaattgaacaatgagaacacatgaacacaggaaggggaacatcaggcaccggggcctgttgtggggtgggggaggggggaaggatagcattaggagatatacctaatgctaaatgatgagttaatgggtgcagcaaagcaacatggcataggtatacatatgtaactaacctgcatgttgtgcacatgtaccctaaaattaaagtataataatataaaaaaaatttagtcttttgcttattttttagttgggtattataattattattgtttagcttctgatttgtatgagtttctgctatattttgaatactaacctcttatcatatatagtttgcaaatattttatcccatcttaaatgttttcttattttttgctgtgcacaatactttaatacactacaactttatgcctccttttattgctatatttttgatatcatatttaaaaaaaacattgccaaggtcagtatcatgaaggcttttcatatgcttttttaaagattttcttttaaagatttatgtattaaatgtaagtctttattttaagtcaatttttgtgtctggtgtaagaaatatgatcaagttttattattgtgcttgcgagtacccagttttcccagcactaagtattgaaaaggctacacgttttgtattgtgtattcatagtgcccttgtcaaagattaactttagatgcatagatttacttctgggctctgtattctgttccattggtttttgtgtttgttcctataaacattccattctattatgtttactgtagtcttgaaatgcaattttaaataataaaatataatgtccccagattttgttttattcctcatgattggtttgaccattcaatatttcttatagttttatatacattgcagactttattttctattactgtaaaaagtggcacaggaattttgataggaagttgaattaatctacagattgctttggataatatggcacttagacaatattcttctaatccataaacatgtaatatatttacatttattagtatcttctttaatttttttatcaatgtattttatttttattgtaaagatctttcgccacattggtgaaatttattgctaagaaatctattatttggttgctattgtaaatgagattttttttttcttttttactggtttgttgctagcatatagaaacaaaactcatatttgtatgttaattgtttattctgcttctttactgagtgcattcattagatgcactatttatatatagttccattaaatgtattatttaaatgtactacttatattttttatatataacattatgtcatctacaaacagtgacgttatttcttcttttcaatatggatcttttagcttttcttgcttaattatttgatgtaggacttaattattctatgtaggacttccagttctatgttaaaatagaaccgttagaatgggcataatgtagacttgcattggtgtttgcacatttgaaggagcaaacacctctttccatttgttgttgttgttgttgttgttgttgttgttttctttttgagatggagtctcgctctgtcacccaggctggagtgctgtggcacgatcttggttcgctgcaacagccgcctcctgagttcaagcaattctctgcctcagcaggctggttttgaactcctgacctcgtgatccacccacctcggcctcccaaagtgctgggattacaggtgtgagccaccgtgcccagtcacctcttttcatttttataaactggttatagtaggtaaagatcttcatctgttaggtctcgaggctgatgcgatctttactgggtttgcagtaaaaaggcttgtagctgcgtcacaaggtggctgccgaatctgaagtcggttttacctttaatgggcttgttaccaggagcacgtgtggttgtgagttctgtcatgtttttgtgcaggctggattgtcttcagggctttgttttgtggagcaggcactagggcaggttctgctatatgctgggcctaatagcagatgtgtgggtgagtgtggctcccactgagtacctagcagtttttcaccaggttatctacaaacagtgacttttgaactgttttgtgcgagtcacgagtatgatgtccccagcttttttcttattcctcatgattggctttgccattcagcctacattgtaggcttgcattttctattactataaaaagtgggacagggattttgatagggatttgagttaacttacagattgctttggataatatgacaccttattaaccaaaagtcctgccttctcaaaatggctcttttcgatcttgggttttagcaaggtttcataatgccctgtaacccaaagctcactatattgcccaggctgttcttgaacgcctggcctgaagcagtcctcccgcctcaggctcctgaatggaggagattactgtcatgagccactgtgcctggatctctcataaagttactttggttgatggatggctgactagtttttattgctgcaggagaatacaaaagtagggaacccctattccaccaccttgataatgtcactgtctccatacatttcttccttattttgttctcttgtatgtttgtgtgttattttaggttcaaatattaagaccaataggctaggatttatacattgtgaaaaaagtaaattagatagttagtagataccctatatatatattataatgttcacctataagattaagtttagtgcaggcaaaaagggctcattaaaattttcatccacttttttcaacctctatccaaactataatataatttatgccccaatttttattttatcaattactcttaaccatatttcataaaatttatattttttcttttatggaaaagtaaggctattatttgattttaaaggctgtaatacagcttttttattttgtacaataatagcaccaatattataaatatttatagtgtaaatacttattgattaaaatcttcccattagattttaattattgtagtgcatttttgtaaaattgtactgccacacaccacagggcaatgattcaaaatgcctggtcttcacagatgcacagtcacagttgaacattgtagttatttagaaaaattcttttctagtgttatatcaatgttccaaacaagatattatgagtaaatatttcacacattctagttttgaaattccatgttaactgtatttttattttagggtaggttccttgacattggtttatagtatttttggttttacctaagtaatattttgggtgacaatgtgcagcaacttttaacgtacagtttatgtcaatgtgcagtttaattacaatatgaatcagccatatatttattcacaattcaagtttaacaaacttaatgaaaactaagcaaactaacgttacatgataaagccccaatcagctatcttatacttaagcaaatacaccaaaaaatagtttgtagctttattgctgcttttgttcaaactatgttttttattccctatatatttcccaaggaaatttctgacattgtcctaccaggctaaagaaacaaacaaaaagacagtgattatactttcaagtagtagtttgtttagagccccagatattccatctgtagatcactatgctcatatttgtctgttttaataaggctgtagcccaaaccttacatttttgtggaaatcaaagattttcagttccatactaaagacaggacagccccatgatctaaatccaatggtgatggtttagagtgaggaccatttcttgtcgacatggagattgttgagttcttctacaataaatctatgggagaggcaggttgtgataagttggctgcagggcagggtattcagggcatgaaaaggacaaagtcagaaaacaaaaacctccagagtcttcagctaaatactgatcagcacatgtatgtgtgtaaactacaatctgggggaaaaaatacctgaaggaaacagaaagaacaatgtttgaacctcccacagaaccaggcatatttggtgttcccaccagcaacagtggacaaatcttatacttcccggaccactggatggaacactcagaaaataattgcctcagtagtgtggaagattagatctaggccgaggctgctaaggtcctacttaacaagacctcaaagaaaaccctcaaagaaccaaaatctttccagataatttaactacatcctagaacatagctcaataatatttataagaacccaacaatatccaacacacaataagataaatttcatgttgtctgccatccagctgaaaattaccaggcatgtgaagaaaaaggaaatgtttcaataatgagaagaaaactgatcaatagatacagaaatgacaaataagatggaattagtaggcaatgatattaaaacagttattgtaatgataatattccacaagaagtaggtaaagggaagctagaacatggaagtagagacatggaagacccagcttgaacttctagagatgaaaaatacaatgtctgagatgaaaaatatactaaatggcatttgaaatagaatagatattatacaaaaaaggattagtcaactggaagatgtagcagtagaaactatcaaaaatggaacatggagaaaataatggaaaaaactgaacagaaaatcagcaccagtaggaataatatatgtgtaattggaattcctgaagaaggtggggaggagtagaagaaaaaatatttgaaaaaactgtggctgagaaaatttaaatttgagaaaaactgtaaacccagagatctaagaaccaatgaacccctagcacaagagacatgaggatgacacactgaagtacatcataatcaaattgccccaaaccagtgacgaagagaaaatctgaaaggttaccaaagggaaaaggacattatacagagaggaacaaagatgaaaataggctgagtgtggtggctcacacctgtaatcccagcactttgggaggctggagcaggacgatcacttgagcccaggagttcaagagcagcctgggcaacatggcaaaaccccatctctactaaaaatacaaaaattagcagggcatggtggcacgaatctataaccccagctgctcaggaggctgaggcagggagaattgcttgaacctgggaggcggaggttgcagtgagctgagatggcgccattgcactccagcctgggtgacagagggagactctgtctcaaaaaaaaaaaaaaaaaaagatggcagacatctggttagaaacaatgcaaggtcaggcgtggtggcacatgcctgttatcccagcactttgggaggtcaaggcaggatgatcacttaagcccaggagttctagaccagcctgggcaacatggcaaaacctggcctctacataaaatgcaaaaattagctgggtgtggtggcgcatgcctgtagtcacagctacttgggaggctggggccggaggattgcttgaacccaggaggtaaaggtttcagtgagctggaatcatgccactgcactgcagcctgggtgacagagtgagaccttgtctcaaagaaaaaaaaaaaagaaaggaaacaatacaaaccagaggatagtggagtgacttctataaaatacttaaggataaaacgattgccagtctagaattctacactcagcaaaaatatctttcaaaaatgatagtgaaataaagacctttggacattgaaaagcttgaagaatgcattaccagcaagtcctcactacaaggaatattaaaggaaatccttcaggcagaggaaaagtgaaaccagatggaagtccagatctacaaaaaagaatgtacagcaccagagatggcaaacgtgtgagcaaaaatacaacattaaaaagcatttttaaaagacaattgactgtttaaggcaaaaatcataacaaattaatgtgagtttacagcacatatagaagtaaaacgcatgaaaacaataacataaaacccaaaaggagggaaatgaatgggcactgttttaaggttcttatcctctatgtgaagtggtataatgttgatggcagccaatgctaagttaaatacatatactgtattagtctgtttttgcactgctacaaagaaatgcctgacacttctcaaaagaagacatttatgcagccaaaaaaacacaagaaaaaatgctcatcatcactggccatcagagaaatgcaaatcaaaaccacaatatcatcactggccatcagagaaatgcaaatcaaaaccacaatgagataccgtctcacaccagttagaatggcaatcattaaaaagtcaggaaacaacaggtgctggagagcatgtggagaaataggaaaacttttacactgttggtgggactgtaaactagttcaaccattgtggaagtcagtttggcgattcttcaggaatctagaactagaaataccatttgacccagccatcccattgctggatatatacccaaaggattataagtcatgctgctataaagatacatgcacacatatgtttattgcagcactattcacaatagcaaagacttggaaccaacacaaatgtccaacaataatagactggattaagaaaatgtggcacatatacaccacggaatactatgcagccataaaaaatgatgagttcatgtcctttgtagggacatggatgaagcttgaaaccatcattctcagcaaactatcgcaaggacaaaaaaccaaacaccacatgttctcactcttaggtgggaattgaaaaatgagaacacatggacagaggaagggagatatcacacaccggggactgttgtggggtggggtgggggggagggagagcattaggagatatacctaatgctaaatgacgagtaaatggatgcagcacaccaatatgacacatgtatacatatgtaacaaacctgcacgttgtgcatacgtaccctaaaacttaaagtataataataatacttaaaaaaataataaataaatttaaaaaaaaaagaaatgtctgagactggggctgggcatgatggctcacgctgtaatcccagcactttgtgaggctgaggcaggtggagtacgtgttcaagagattgagaccatcctggccaacatggtgaaacactgtctctactaaaaatacaaaaaaaaattaggtgggcttgtggcatatgattgtagtcccagctaagctacttgggaggctgaggcagcagaatcacttgaaccagggaggcggaggttgcagtaagccgagattgcatcactgcactgcagcctggacgacagagcaagactacatctcaaaaaaaaaaaagaaaatatctgagactgggtaagttatgaagaaaagaggattaattggctcacagttctgcaggctgtacaggaagcgtggttctgtcatctcctcggcttctgggcaggcctcagggagcttacaataatgacagaatgcaaaggggaagcaggcacatcttatgtgactggagcaggaggatgagagaaaggggggggggtgccacacactattaaacaactagatcttgtgagaactcacttgctacatagtaccaagtggggatggtgttaaaccatgagaaactggctccatgatccaatcacctccctccaggccccatgtttggcattggggattacatttccacatgagatttgggtagggacagagatccaaaccatatgatataccataaaccatagagcaatgattaaaactcaaaaccaaacgaagcaaaaatagttatatgtaaaaggccaactaagaagattaaatgaaataaaaatactcagcaaattcaaaagaagtcaaagaggaaaaggagaacaaactacagatgagacaaataaaaagcaaacaggaagatgaccaagtaaaaccaaactctccggcattccaccagttgtgtgtgattatttagcaactctctgcctctgacaataatacctgtcacacagggttgtcatcagagcttgccacatgtgatatggaaagcctgctgtttacagacctgcaatcattataccttagctcgtattgttggtagcagagacccaggtctctgtgttggtcatgctgagagctcccttctcattgctctgttttcctcctcttttgttccctttctgtacttccactccccacactatctggttggagaagattctcagcctctcagtctgcaaatattcaaagtccatgaatcaaatagccaacaaatgtatttctgtacatttatctgctacccagggatccaggagaaatgctttccttactgcaagaagtctgcggctgctgatgtcaagaatctgctctctgtcctcttctcttttctgatctgcatattctcaactgcactgcacttctgggaagatgttacacagagacaactatgagtttttgtaagaagatgagaagtcaccactttgggaaccatccattagacgtaccaatattgctgcagatatggattctggcaagttctcttcttctctgacacccaccccttcccccattggcaacagcaacttgggtttgctcttcagctatggcagtgcctacctctggggaactgtgacttgctttataccctatccaataacacagtgtgcccttatacacagtaggtgttcaatatacatctgttgaagggatttcatcacagttaaatctgtggagagttcagcagataagtgagttgctcaagatggtcagaggctatcttattccatttgggctgccgtaacaaaataccttagcctagggggcttataagcagcagaaatttatgtctcataggtctggatgctggcaagtggaaggtcaaggtattgacagattgggtgtctgttgaggacctgttccttatagagggcacctcctagctgtgtcctcaaatggtggaagaagagaacaagctcccttggctcccttttacaaggccacttcatgggcttcaaggtcattcatgggctctttgctttcatggtgaaatcacttcctaaagtctttgcctcctaattcaaacctaacctatcaggggttaggtttcaacacacggattttaggggcacccaaacattgactataacagagacgtagctggacctgggtctgggacctactgggtccagctcccatatgacactcacactgcacatggcctccccatggtgtgattctgttctgtgacattgtgcccatgaggcagggatgcagtagaggcctctgcagacatggtttgttcttgggacgtctgcctggctttgtgccacaggcctggaggaatccaccagctgcccactctcatgcctgactcaggttcgtgggtccctccaggcacatgtcagacagcccactcaattttttacttgccccacctccctgggttcccttctgaactcagggaacaaggagggagctgagagtctctgtttttagttcatgctcttgtctcctatttgggaacaatgcccaggcaaggggatcactttcctactgttttctaagaatatcaggggcttcctccaaactcctcacccactctctccataatcccttctcctttggggacacagggcacaagcccacctcctgtgtgaagatcctgccacagggtggctctttggttttctgcgggtatccagacaagaggctaaaggtgaatgcactccggaatccaggagcactggcggttttctctccttagctcagagagcatccccacagatacccctcgccccaccccgggccccctgaatccataccataaaatgtatgtcagtttgttcaactaaggaccgcactgagtatttaatccctatttaaagatgatgtttattttatttttgagtttaaattaatcagcctcaggatacagaattagataaggccgggatttagctcccctagaatgattcatttcacatcgagccttcttaactctttggctgcagaggggaaatgcctgtatctttctctgcagagttgcctagggctggccaggtgaacagacatgctacctcctccccatcctgccagccagggcacggtgtgtgcttatgatgcagggagttagaatactagccttttcatcacaacagtcataaatcctcacacagggaaatagagataatatacaagtaggaaaaaaagaaaaagaagcagtcttgaattctgcttcctaaagataaccatcgttaccatgtaggcaagtttcctttcatgctgtgtcaagtgtttaaaaaatatggctcaatattacaaacacacaggactatgtagaggataatgatatcaaactttcatgtacctcccagttaaaattcaaacgtggtagcttttggatgcatttgctccagagtttaagggaagaaaactacggattcagccataatgttcatgctgacgctcaagttatatgtcccttttctagtccagttaccgcctccctccccactattctgaagtcaatgtgtgtcttcccatccatgtttaatacctagtgtgcatgtccgtgaagaatggatagtgttctttggtctgtttttgcaattttatacaaatagcagtccatacatactctcctgaaagttgcttttcccctcaacaatatcttccagatgaatctagaattctgcatttctggtgagcaaaggatgcgcgaccccccctgcaacccccaccccaaggtgatgccgatgttctggtccaaggcctgcacgtagcctcgtagggcttggggtcttgggaaaggtctgttgtcagcccttccttccaaggaagcacagccagatgaccttggggctggagacctcacaatgcccctcgccagcagtgcgcacatccatcttcactcatcttcatcaatatttgttatcttactttctgatattgttcctggattttgctatgcagctgaatgcgtgccttgtgtttcccagtccttcgggtctcctcctctgtgaattgctcctggcccatatgtctgttgggtctttggtttctccttgctgacttgtaagtgctagtttttttttagacggagttttgcatttgttgcctaggtgggagtgcaatggcatgatcatggctcaccacaacttttgcctcctgggttcaagcgattctcccacctcagcctcctgagtagctgggattacaggtaagtgccaccacacctggctaattttgtatttttagtagagatggggtttctccatgttggtcagactggtctcgaactcccaacctcaggtgatccacccacctcagcttcccaaagggctgggattacaggcatgagtcaccacgtctggccaattttgattttaatgatctggatatcaatgcttttttggccaaatgtcttacaaatatgttttccctactggtgcactgtattagtccattttcacactgccgataaagacataccccaggctgggaagaaaaagaggtttaataggacttacagtttcacatgactgaagaggcctcagaatcatggtgggaggtgaaaggcacttcttacatggcagtggccagagaaaaatgaggacgatgcaaaagtggaaccccctgataaaaccgtcagatctcatgagacttattcactaccaggaggacagtatggggaaccgcccccatgattctaattatctcccaccaggtccctcccacgacacaggagaattatgggaggacaattcaagatgagacttgggtgggtacacacagccaaaccatatcatgcactgtctttgtcttttaactttattcatcacctcttttgtcagatcaaagtttctacatttaatacaattgaatttatcagtaatttcttttatggtgtctgtgttttgtgtcatattaaaaaaagtttttctctgcttagtgtcataaaatctgtcctctgttttcttctaaaaattggaaatctgcttttcacattttgttttatttcctttgttctttgattcatagggatgtgaggtagaaatctctattagttaactcttgctttgtaacaagtaaccccacacctcagacgcctatgaccataggccactatttctcactcatgagcatgggttgcttgggaggtttcagctcgaactgtggtggctgagctggatctgctccaagtgtctctgatcctcctggggttggggcctgccagggtgccttcttctcatggcaatgacaggagtgcaaagaacaaagggaaatgtgaaggtctcttatcttaccacccaggctcagaatgggcagactaccactttaccacatccattcaccaaagtgggtcacgtggccaaaccagaagtcaagggcgggaagtttaatatgaatcccatctccacgtgctatgatttcgtggactttcaacttcttaaggctgaattgttttattctcacctccccagactgcagaaaacacattttctctaggactccttgagccacagggcagaatgattttagttgacaaggactagatagaactcaaggctccagcctctgtgcagtggacaggtgtcatttggccactgaggccagttccttccccttgtccccatctagggcctctgttctgctccaatctccctgtccttctgcccagaccttccaggaatcagccttttaatagttcctgtcttctttccctctcttcacttctattatgtgagagtttccatccttatttggtataggaggactggactgagtcaactcagcctgtcacatccccactctcagcacctgggtaccccttagtgttcagcatgagtggggtcccccggtgtctccctccacagcacgttctgaaggcctgggagctggactgacatttgggacaccaaaacctttgttccacttctgccatgacagcttcatttgtccaggcaaatcatggcagctctcaatgcctcatttttttattcctcacacaatggaatgacataaccctcagtgcttacctaagggaggagaaatgattcccctgccttctccccatttctgcatttgccagagcatcagatttttgtgtctggccaagaatatagggaaggaagagcaggtaagctttgggcacaaagagggcgtttaggggtttcacttaaggaaagaaagtcagggggcagagaggggtggtggagcatgatcttgggccaatggtgaggaactaatgaagtgcaatgtacatgggttaggttgtgtagcagcctgggtcccatcaagaaatagaaaccacatagtgggtctaacagggaagtgtagtataaaggattgcaactatgataaaagagtcactgtaagacttaaagcaactctgcctggtgccctagtgcagagggaggtacccaaggaagcacagatttgaaaggtgttcagatattataaaatgtggttcagccaccacatgagacgtttgtggatttgggcaggctggagctagtcagcagcttttgcacaagcactaggccacccactggaatgcaggtgagggagtcggccgtgagccgctggagtgcaggggagggagcctgctgtgagccgctggtgcaggtgaggtagccggccgtgagctgctggaatgcaggggagggagcaggccgagagccgctggagtgcaggtgagggagctggcagtgagccgctggtgcagggatgcatggcgggagtctggctgcctttgtagggcaggaagcctccagaatgcgtgagtcccacagggtctggcaggaggaatggcagctctgtgcggacccgctagaatacaggtcactgtgtgcaggttaacacaaggggtacaagagggggtctgggaaacttttcaggaactttcagatcacatgggccctgctgcgttttggtttccatgtcgagatgttgcaagccaaggctacaaggtggctgagggaccacgcctaagtctgtggttggggcttgaacatgatcaaggcccagccagagagctcctgccccctgcagtctctccatcctctacctagatgcctgcagaatgttcacttccagagggtatattgaacagtgtttcccagtttatcacagtgcacgtattgaaaggtgaactaggagctgggaggcaacagactgaaaactgacactggagacgctggctcatagcaacgaagagaagctgaaaaggagtgggaaggaactaactgtaattttacatcaatgatctgcatctttgtttcgatggcttgtggcaaccaaaatgactattttttctaccctcctagttcagacatagcctgagacttttttttttttttttttttttgagatgaagtctcactctgtcactcaggctggggtgcagtggcttggtctcggctcattgcaatctctgcctctcgggtccaagtgattctcctgcctcagcttccagagtagctggggctaacgggcacctgccaccacgaccggaaaattttcgtattattagtagagatagggtttctccatgttggtcagactggtcttgaactccagaccttgggtgatctgcccgcctctgcctcccaaaatgctgagattacagatgtgagccactgtgcccggccgcctgagacattttgggcaacatctgtgacagaagaaatgtgcatcctttccgggcaggggatttaagaagtggctcatggctgattatgttttctttgctctgtttctggaactgtgggagcatcttctgggataagggtctatctgtttgagtctctgaatgactacgaccaccagagcccccttgttgacccgtaatggatgtgaaatcaattgagaagtcaaggcagggtgcggtggctcacgcctgtaatcccagcactttgggaggctgaggcgggcagatcatgaggtcaggtaatcgagaccatcctgactaacacagtgaaacccggtctctactaaaaataagaaaaattagccaggcgtggtggtaggcgcctatagtcccagctactcaggacgctgaggtaggagaatctcttgaactcaggaggtggaggttgcagtgagctgagattgcaccactgcactccagcctgggtgacagagcaagactccatccaccgcaccccatcccctgcaaaaaagaaaaaaagaaaagaagtcaactttgctgttgaacccactgaggtttgggggcttttttgttacatgactcatttcatccttggcacagcccctgagagaaggggctttatcctcatttaacaaatgaagaatcaagtctcagagaggttagcagcatgagcaagctcacacagcgagaggtggagcttggatttgaatccaggtctgtctaacctcaaagactgaagtggggatgaaaataagttgtcattgttgtttgcctgtcacccaggtgatgtaactcttgtctaggcttttcctacggaggctttgtgacatatctctgcactgatcagccaggtgatgggactcttgtctaggctcttctatccttggattgtaaccttgcaggatcttgaactcatatcctttcagggatcatagaagtgaacacatcaaagctgccatgataaagttgtggaaaagtgggcaatattgccaaatgcaaaatatctgggctacattttgtctgagatcaccatttgagattcctggaagttagggaatatggaggccaactcccgtagggatgttgtataagactccaagccgtaagtcaatgatctcaaccctgtggatcagcactctccatgtaatgggtcatcttaacccattttgtgctggtataacagaataccatagactagggaatccataaagaaaagaaatttatttcttagagttctggaagctaggaagtccaaggatgaagggtctacatctggtgagggctttcttgctgtgtcatctcatggctgaagtcagcagagcaagactttgagaaagagagagagcaaaagaggctgaacttgcttttaatacaagcccactcccaagataactaacccaaccccaagataactaacctattctcgagatagtgacattaatccatgcatgggggcagaatctcataacccaatcagtcttattaggccccacctctcaacactgtcacgtagaggattaagtttccaacacttgagctccggcggacacatgcagaccatatatgggggattgatgagtatatcggagggaccagtcatgaatattttggctgagagttgtgttttcgagctgaagccatgctccatcatggcagggcacacatagacctttgaatgctctgaggaatgaatattgaacagtgtaactcatggcagaaggtggaatatttaaaaggcagaactgcctgggtcaactaaaagagtgaacaaacagcctgtagcctgtggctggctcctcttctcttcccatccctacctttcacctttctctctttctttctttccctccctctctccctctatctctcccttccttccctccctccttccttcatttcttcattccttcctttcttccttccttcctctaccttctttctctccctccctgcttccttgtttatttccttctttctctttccctctttctcttcctccttccttccttctttctctctcatttccttctctctttctttgtctctatccatctttctctccctccatccttccttctctcattctttccttccttccttctctctttccttctttgtccccttccttccttactttcttcctccctccttcctgccttcctttcttctctttttctttgactgatttgttctgagcccaagcaccctgtggggtactaagtggtaccaaaattgactcaagaatcaagaagaaatagaaaacctaagaagtactataacatgaagaacataaaatctctagtaaaacaaaatctttcacaaaggaaggaataggcccagatggttgtatgagcaaattttacacactttcaaagaatggatcattctaattatgtcccaaacaactggagctaggaatattaatgcttgatttttcaagagattcatttcctaaaatgtgtaggtttaaaggtagattgacatgtgttagaaaaccttaaatgttgtgcagttccttggagttttagcattaaaaaagaaaggccttgcctgcattaactttgaattttgtaacagttaccagttaatagagatactctatgcatttatacacactctgattttataggaatggaggcatatcagacacacggctctccacccaggttttttcctttgtaacatatcttggacatcatttttgagcatccttttaaaatttatttttttaaatagctgcctagtattctatcatatgaataatcataatttcaataaacagtaagttgataatcattaatgtgattgataaacattaaggtgatttctatacttttgttaattaaaaaggtggtataatattttctgccattcataaataattccaggcatcatgactatgtctgtagggtaaatttctggaaatgaaattgctgaatcagagagtatttccatttataattttggtatatattgtttaatcacaattgatatagtttgtactaatttataaacccagtaacaatatgtgagtaccacttcaaactccacaacttcactggcagtacttgaagtgatgatgcatattaccagcctcccttaaagtaaagttctattaactctacaaaaattttataaatggcagatgttacatttccagatagctttgtggtaaccaaaaaataattgatttattagcaatttgtatatcacattgagacaaaatatatttgtgataaatatcattattgttacgtatttaaaacatctcatgtattaagaaatcatactttagatggggccaaactggccgattagaagcagctgtggcccgtggctctcacagagagcaatgaaaactgcgagtgaattctgcaccttcaattgaggtattcaggttcttgcattgagactgaataggcagacagctccacccacagagagtcaggaaaagcaagtgggtcaatgacccacccaggtgtggcacggagctagccgagcccccatttgcaggcaagggaggccatgagtgattgtgcgactctgcccgggaaaccatgcttctctgatggatctttgcaacctgcagatcaggaggtcccctcatgagctcagccaccacggccttgggtctgaagcacacagctgtgtggagtctcagcagagtgcccactggcttactggggcatgcatggaaacccaactttgccccgagaattccagcaaagcgggagatacatctgtgcattcccctaggaagggggctgaatccaggaatccaagtgacattattctgaggccccactcccacagcacctcacaagacccattggcttggaattccagctggccagtggcagcaggctggagacagccggaggtggactgagttcctgggggagaggcagctgctctatctgtggtttgagttggctgctctagcctgctggcaccagggacaaggaggagtcccctataacacagtacagctgttgtgctgatcgtggccaggctgcttctttaagtgagaccaaaatccatccctcctcactggacagggcctccccatcagaattttagaaactccagccagagttatatggacagaactctgatttctccctgggatgaagtccccagggagaggggtagctgctgtctccccagttcagccaactgaacctttccagcccgctgtctctggagaatcctgggggtcagaacaacacacctgctctgccaaagggcagccagactgtttctttaagcagtccctgatcctgttcctcctgactgggtgagacctcccaacaggagactcaagacaccccctacaggagctttccagatgacatcaagtcagtaccaccttggactggtgctcccagaggaaggatcaggttgccatctttaatgttttgcaggcttcactggtgatacctccaggtgcaggagagactgaggtgactagggtccagagtggaccccaaaaaaccacagcagccctagccctagggaagagtggtctgagtgttaaaaacaaacagaaagcaacaacaacatcaacaaaaagaccccgcaaaaactctgttcaaaggtcagcaacatcaaagatcaaaggtagataagcccacaaagatgagaaagcatcaacacaaaaacgctgaaaactcaaaaaggcagaatgcctcttctcctctaaatgacaacaccacctccccagcaagggcacagaacagattcgaggctgagatggctgaattgacaaaactaggctttaggaggtgggtaataacaaacttctctgagctgaaggagcatgttctaacttaatgcaagaagctaaaaatcataaaagaacacagtagctgataaccagaatattcagtttagagaggaacataactgaaatgatggatctgaaaaacacaacatgagaacttcacaagacaactacaactatcactcacagaataggccaagttgaggaaagaatctcagagcttcaaagctatctgtctgatataagacaggaagagaagaatagagaaagaagaataaaaaagaaagaactacaaaaccttcaagaaatatgggattacgtaaaaagactgaacttaagactgataagggtaccttgacccaccatgatcaagatggcttcagccctgggaatcaaggttgattcaacgcaggcaaatctataaatgtaattcatcacctaaacagaactaaacacaaaaacaacacgattatctcaatagatgcagaaaaggccttcaataaaattcaacatcccttcatgttaaaaactctcaataaactaggtattgaaagatcacacctcaaaataataagagccatatataacaaactcacagccaatatcatactgagtgagcaaaagctggaagcattccccttgaaaactggcacaagaaaaggatggcctctctcaccactcctattcaatgtagtactggaatttctggccagggcaatcaggcaggaaaaataaataacagtatttaaataggaagagatgaagtcaaattatctttgtttgcagatgacatgatcctgtatctagaaaaccccatcatctcagcccaagagcttcttaagctgataaaccacatcaacagaatctcaggatacaaaatcagtgtgcaaaaattgctaatattcctatgcacaaacaacaggcaagtagagagccaaatcgggaatgaacttcattcacaattgctactaagagaatgaaatacataggaatacagctaacaagagaagtgaagaacctcttcgaggaggactacaaaccactgctcagagaaatcagataggacacaaacaaatggagaagcattccatgctcatggatagggaagaattcattcctgaaaatgtccatactgcccaaagtaatttataaaggaattcaatactattcccattaaactaccaatgacattcttcacagaattagaagaaactattttaaaattctcatgaaccagaaatgaacccaaatagccaaggcaactctaagcaaaaagaacaaagctggaggtatgacactacccaacttcaaactacattataatgctacagtaaccaaaacagcatggtacttgtacaaaaactaccaatgaaacagaatacagaactctgaaataagaccatacacatacaaccatctgatctttgacaaacctgacaaacacaagcaatggggaagggattttttatttaataaatcatgttgggaaaactggctagccatatgcagaaactgaaactggacatcttccttataccttatacaaaaaataactcacggtagaataaagacttaaacataagacctaaaaccataaaaaccatagaagaaaacttaggcaataccattcaggacataggcatgggcaaagactttgcgactaaaacaccaaaagcaacagcaacaaaagcccaaattgacaaatgggatctaattaaagtaaagagcttttgcacagcaaaataaactctcatcagagtgaacagacaacctacagattgggagaaaatttttgcaatctatctgtctgacaaagggttaatatccagaatctacaaagaatttaaacaaatttacaagaaaaaaaacagccgcaccaaaaagtgggcaaaggaaacgagcagacacttctctaaagaagacatttatgcggccaacaaacatatgaaaaaaagctcatcatcactggtcattagatgaatgcaaatcaaaatcacaatgagataccatctcacaccagttagaatggcgattattaaaaagtcaggaaacagcagatgctgatgaggctgtggagaaataggaatgcttttacactgttggtaggagtgtaaattagttcagtcattgtggaagacagtgtgaaaattcctcaaagatatagaaccagaaataccatttgacccaacaatcccattatagggtatatacccaaagcattataaattattatactataaagacacatgaactgtatgtttatttcaggactgtatgtttatttcagcactcttcacaatagcaaagacttggaaccaacccaaatgctcattaatgataaactggataaagaaaatgtggcacatatataccatggaatactatgcatttatgtcctttccagggacacggatgaagctggaaaccatcattctcatcaaactaacacaagaaaagaaaaccaggccaggagcactgactcatgcctgtagtctcagaactttgggaggctgaggtggagagtttgagatcagcctgaccaacatgaagaaaccccgtctctaccaaaaatacaaacaattagccaggcatattgtcacatacctgtaaccctagctgcttgggaggctgaggtaggagaatcgcttgaacccaggaggcagaagttgtggtgagccaagatcacgccattgcacttcaacctgggcaacaagagtgaaactttgtctcaaaaaaaaaaaaaaaaaaaaaaaaagagagagagagaaagaaaaagaaaaaaaaaaggaaaccaaatactgcatgttctcactcataagtgggagctgaacaatgaggacacatggacacagggaggggaacatcacaccctagggcttgtcatggggtgggaggctaggggaggaatagcgttaggagaaatacctatgtagatgacaggttgatgggtgcatcaaaccaccatggcacgtgtataactatgtaacaaacctgcatgctctgcccatgtatcacagaacttaaagtacaacaaagaaaactttacataaatgcataaagtctagaacagctaatatattataatgaaatgtcaactataatcccagctcaaagagaacaccataaaattatgaagagctctccacaaatctctaaatttgtgtcctcataagattacatttctatttcttcttgaataatttcctcattttagctatgatttaatgatagtaagatggtaattatgaggagaaaattctcccaacactccattgagaaaattctgcctcatttcaccacacacctgagtcttaagcagtcacttctaatgtagctgaataatagatcctcacccagtcgagtctatgagttgaatccatgtatgtgagataaggcccccaaggagaggtaataagctgggaatgccatcagctcatctttcttcaggcctatatttgtcattgtcacttgtagaagcaggacagccctggcattggggttggtagtaacagagagtatcaaagggaaaactgacctttcctaatttttggaaaaaagcagattggaaacagatgggctccaacgttttccatgtgtaaggtcattgtcccaggtagccttgctcaggacatttcttgtcaccaaaacagaagtcaaacgatatttctaccttccaagatagaagatattgtcagagtttctcatggatacccacaagttcaagaaactttcatggccttatttaactgcttaagcatttcaactaaaaaattatttgtctttcaaatacacaggaatctggaaaaatgttaaccagaaaaagttggaatctaaagtaaaaaatgcataaggccataaaaagtttttacatcttttaatttatatgtcaactggggaaaaaaaaaacattctctgaagtttccttttataccattaaagacttattctttattaccagcaatacagggcgacttattcaggttgaatcttgaagataaactttaacttaattttaagttttggctaatttttaagcattactcagtcacctaccatgatttcatctcagaaaccaaaatctcaatttcatttagacctttgaaatattaaaacaggttaaatgcttcaaaataatattcatgtagagacttacatatgtggaccaggaatctccatgtattacaaagtttatgagaacataacaaatgttgatacacacatttaattctgaaataaaaacttacaacaaataaaactaacaaatcaagaaaattttgtaggttacacattttaagtctaaaaatataggtatgaaacactcaaggatggataaaagaagaaatcacaagagaaagtagaaaatatctagagacaaattaaacacatgaaataccaaaagttaagagatacatcaaaaaaggtaccacaagggaaaaatttatagctataaatgattataaaaaataatataccaaatcaacaactttactcctaaggaactaaaaacagagggaaaaagagggactattaaagagggacaactaaaagctagcaaaattaaaaaaaagataaagatagcagtggaaataagtgaaatagagaatagaaaaacaatttcaaaaatcaacaaaacctaattttttctctgaaaaagatcaaaattgacaaaattttatctagattaagaaagaaagggaatattcaaattactaaactcaaaaataaaatgggtacattactaacaaatttttggagtaaaaaagggatgtagaagagtaccataaggaactatacactaaaaaattgaatagcctaaataaaatgaacaaattcctagaaacaaaaaacctactaagactgaatcagaaaagttgaataaacctattcagcaaggagattcagcaggaagattgcatcagtaatcaaaaacccagcaacaaagaaaagcctggaccagatggcttcactgttgaattctacccaatgtttaaagcagaattaacaccactttttctcaaactttttcaaaacgttgaagaggagttatatttttctaacttactctatgaggccagtattaccctgacaccaagccagacaaaggcaccataagtaaactacaaacaaacatcccttataaatgctgatgcaaaaatcctcaacaaaatacctgcaactcacacttagcagtacattaaaaggattatacactatgaatgagtataattgattcctgaaataaaagtatgttccaacacatgaaaatcagcgtaatagcacattaacataaagaaagaaaaatccctcatgtgatcatcttaatcaaagaagaaaaagcatttgtcaaaatttaacccacattcatgataaaatatacttaataaactataaaaagaaagaaaacaccttaacataatgctatacaaaaaaacaaaacaaaacaaaaacacacagctaacatggtgaaagactgaaagcttttaccctaagagcaaaaacaaggatgcctgctttactacttctatttaatatagtactgaaagttctagttgttaaaacaataaggtgagtaaaataattaaagatattccaattttttaaaaagtaaaattatctatttgcagatgacataaccttatatattaaaaatcttttagtttctgtgaaataaactgtcagatgtaataaataaaattcagcaaagctgcaggatacaaaatcaatacacaaaaatcaattgtatttctacaacaacaataaactctctgaagaagaaatcaagacgatagtatcatgtatgataatatcaaaagaataaaatactgagaaacccacttaaccaaggaaatgaaaaacctgtacagcaaaaactagaaacatggcatgaaagtattaaagatgacacaaataaatgaaaagacatcatgtgtttatggactggaagacaaaatcttgtcagggtgccattgttatctatagtcatctacagattaaataaaatcactgtaaaaattccaatatttgaaaaaatagaaaaacctgttctaaaattcagatgaaatctcaaaataccccaagcagccaaatcaatcttaaaaactaacaaagttagaggactaacacctcctggtttcaaacttcagtaggcaaaacaatgctgtaccagcatagagacggacacaaagaccaatgcaatagaaataaagaaccaaaaaatatggtcatgatttttaacaagggcgtcaacactgttcaattgggaaaggacggtatttttttaaatggtgttaaaaacggatatttacatnnnnnnnnnnnnnnnnnnnnnnnnnnnnntatatatatatatatatatatatatatcccaaattagctttttgtcagtcatgtatgttgcagatctatttccccaatctgttgacttttgactttgaagcatttttctctcatacaaaattttaatttttatggagtcaaatacaaccttggcgccgatctggttcccgcactgcccggcctgcgtgagcacgatttccctcatggccaaggcgggattagagtggcaggagaaacgcgagaaggaggagcagatgcacagctacccagcccgtcctccaccaacgctgaaatagccccgtgcccacctccctcagcctcagattcggctcccagaataagcaacagctttacttccacacagatgtacccacctgtgaatcccttagggttgaacatctgttggagagctcaggtgtccttgctgtggtcctttccacgttggggaaagttggtcagctggagaacttcctcccacatctttagtaagactaaatccctagctgagctgaaactgaattttcctcccatgtgggaggggaagacttgatgagtcttttcatctattaggagttctgtggttaggaaaggtcttccaaatgttaacaggatttaattataagttttactttggagcagttcaaacccgcagtaagctatgggtgttagagatagtcaggtgtatgatttagctagagtcttctttagagtaagattagccctttcatctttccagagtactgtggtctgcacacagagtgaaggtaatattggattcttaaagctgaggataggtgttgagatgcacctgctgtgaaagacgggtcattgccactttgcaggcttttagattacccaaactgagaagttatttcttctggtaaacatttttcagatggggtggtgaatgcctcgatctaaccagcgaagatatcagtaagcattagcaaatatttgaatctcctgcagaaaggtatctgagtaaattagagttgccagttctcacctggataggttcctcaattttggacaggtttacctggagaaggagaaaattgctggccatttcggtcatgtcaggcacagagctcagaggcctgagtcacctgtttttgtgtcttgaaaagatttacccctataaacaaatgagacattaacagaaaccaataatcccttctagggtgaaaagaatcatgaaagtgctgaattatattcctatgattggtacttggcattagtaatttattaccatcattcagccagccagaggggccctggactgaaatgcaatccctggcccatttttgttcttcttcagagtgttctggcccagttctatgtatgctgaccagcacgcccataagcttcattggcccttttagtgcaggggccttggctgcgacatctacaagggcatttccttttacatggtcagtctctcttttgatgtcctctgcaattaattatagtcactcttggcagcaaagcagcattctaacaagctcaaaatctgaatgatgttgtatggaaaagcccttgggggtcaggagttcctacccattccaaattgcaacataagcatgaagcactaaaaaatcatacttggaatcagtttaaatgttaacttttaaatcctttcccagctgcaggggctgagtaggttcaattaactcagcttgttgagctgaagtagaggtcagcaaggctcgtgccttgattctcttgtgctgactactaatagcacacctagccctcctgttttcctgatgcataaaacaacttgcatctgttaaccactcttccttgggatggtcaaggggctcatctctctgaagtctggcctgctagaatcaattcgtttcataacctgtgacatgcttcggctgtgtcccaagtcaaatcttatcttgaattgtagctctcataattcctatatatcgtgggagggatccagtgggaggtaatctaatcgggggatgggtctttcccatgctgttctcgtgacagtgaataagcctcatgagatctgatggtttatttatttatttttgagacatagtcttgctctgttgctcaggctggagtgcattgttatgatcttggctcactgcaacatctgactcctgggttcaagtgattctcctgtctcagcctccagagtagctaggattacaggtgcctaccaccatgcctgtctaatttttgtacttttagtatagacggggtttcaccatgttggccagggtggcctcgatctcctcacctcaggtcatccactgccttggcctcccaaagtgctgggattacagctgatggttttataaagggaagtttccctacacaagcccttttgcctgatgccatgtaagagatgtgactttactcctcatttgccttctgccatgagtgtgaggcctccctgaccatgtggaactgtgagtcaattaaacctctttctttataaattacccagcctcagatatgtctttattaacagcatgagaacagactaatacaacctgtatgccagaaaggctagaagctcctgtggactctggccgataagtagctgggtttatggtttggtaggctttaagggttgtctggagtgtctagcaataaggccttatactttcataaatgttctcctattatccactgctgccctttagcttctaggaccaccttcccttggtgtggggtcaaaaacctataggtgctgttctgatgttagtttattagctttgcctactagaaaagtagtatcagcaatagctctaagacatcaaggccacgctgaggccacctggtctatctgcttagaaaattaggctactggccttggaatgtccccgttttgggacgagattacccaaggcctatgccttgctttttggccacataaagaaaaaatggttcatccaacttggggactcccatggctgcagcagaccccaatttctccttgagagtattgaagttttgcttgcagttctcattacattctaggagctctaaatctttccctttagtgtatcatataaaggcttggctacatgcccaaatctgggcacccataagcagcagtacccagccatctcctaaaaaagcccacagtcatttttggactgggacccttggatgactaaaataacttttttatcttctagggatgttgatcagttccagaggttaagatagattccaaatatttaagtatttgagtcaaaatctgagccctgcatggcgatgccctatatctacaagttcccaggaaatttaccaacttaacaatattattatttgagtcttctttagttgggtttagtcttctttaattgggctagcaatgagcaagtcacctatatactgagtaattgtgtccctttccaattgtagatttcttaagtccttagctagagtattttcaaataagttggtcctatcccagaacccttcaatgatgactgtccaggttagttttgaggctgaatgcctatctggatcagcccattcaaaggcaaacatattatgaatctgcattaatatgcagaaaaatacatctttcagattttttttagattaggatttttattgaaaaagtaatacatgcaattcatacagaaagcttcagagtacaaaagggtataaaaaagtcactctacttctgtgcatacaaacatatgtacatatatgcatctttccttattaaaaaaagggcgtaaacctgcacaccaatgtgagtcttttaaaaatttcaacaaattaagttgggtaataattttatttccacactcgtagatgttttattttttaattcacttaatattatttcaatatatgaatatgcactaaattttttatcctttttttaaattttattattattatactttaagttttagggtacatgtgcacaatgtgcaggtttgttacatatgtatacatgtgccatgttggtgtgctgcgcccattaactcatcatttaacattaggtatatctcctaatgctatccctcccccctacccctaccccacaacagtccctgcagtgtgatgttccccttcctgtgtccatgtgttcttattgttcaattcccacctatgagtgagaacatgcgctgtttggttttttgtccttgccatagtttcctgagaatgatggtttccagcttcatccatgtccctacaaaggacatgaactcatcattttttatggctgcatagtattccatggtgtatatgtgccacattttcttcatccagtctatcattgttggacatttgggttggttccaagtctttgttattgtgaatagtgccgcaataaacatatgtttgcatgtgtctttatggcagcatgatttataatcctttgggtatatacccagtaattggatggctgggtcaaatggtatttctagttctagatccctaaggaatcgccacactgacttccacaatggttgaactagtttacagtcccaccaacagtgtaaaagtgttcttatttctccacatcctctccagcacctgttgtttcctgactttttaatgatcgccattctaactggtgtgagatggtatctcattgtggttttgatttgcatttctctgatggccagtgatgatgagcattttttcatgtgtcttttggctgcataaatgtcttcttttgagaagtgtctgttcatatcctttgcccactttttgatggggttgtttatttttttcttgtaaatttgtttgagttcattgtagattctggatattagccctttgtcatatgagtaggttgtaaaacctttctcccattttctaggttgcctgttcactctgatggtagtttcttttgctgtgcagaagctctttagtttaatcagatcccatttgtcaattttggcttttgttgccattgcttttggtgttttagacatgaagatcttgcctatgcctatgtcctgaatggtattgcctaggttttcctctaggtttttttatggttttaggtctaacatgtaagtctttaattcatcttgaattaatttttgtataaggtgtaaggaagggatccagtttcaactttctacatatggctagccagttttcccagcaccatttattaaatagggaatcctttccccattttttttgtcaggtttgtcaaagatcagatggttgtagatatgcagcattatttctgagggctctgttctgttccattgatctatatctctgttttggtaccagtaccatgctgttttggttactgtagccttgtagtatagtttgaagtcgggtagagtgatgcttccggctttgttcttttggcttaggattgccttggtgatgcaggctcttttttggttccacatgaactttaaagtagttttttccaattctgtgaagaaagtcattggtagcttgatggggatggcattgaatctataaattaccttgggcagtatggtcattttcacgatattgattcttcctacccatgagcatggaatgttctttcatttgtttgtatcttcttttatttccttgagcagtggtttgtagctttccttgaagaggtccttcacatcccttgtaagttggattcctaggtattttattctctttgaagcaactgtgaatgggagttcactcatgatttggctctctgtttgtccgttattggtgtataagaatgcttgtgatttttgtacaattattttgtatcctgagactttgctgaattcgcttatcagcttaaggagattttgggctaagatgatggggttttctagaaatacaatcatgtcatctgcaaacagggacaatttgacttcgtgtcttcctatttgaataccctttatttccttcccctgcctcattgccctcgccagaaattccaacactatgttgaataggagtgatgagagagggcatccctgtcttgtgcccgttttcaaagggaatgcttccagtttttgtccattcagtatgatagtggctgtgggtttgtcatacatagctcttattattttgagataggtcccattaatacctaatttattgagagtttttagcatgaagagttgttgaattttgtcaaaggccttttctgcatctgttgagataattgtatggtttttgtctttgttctgtttatatgctggattacatttattgatttgtgtatgttgaaccagacttgcatcccagggatgaagcccacttgatcatggtggataagcttttcgatgtgctgctggattcggtttgccagtgttttattgaggacttttgcatcaatgttcatcaaggatattggtctaaaattctcttttttggttgtgtctctgccaggctttggtatcaggatgatgctggcctcataaaatgagttagggaggattccctctttttctattgattggaatagtttcagaaggaatggtaccagctcctccttgtaactctggcagaatttggctgtgaatccatctggtcctggactttttttggttggtaagttattgattattgccacaacttcagagcctgttagtggtctattcagagattcaacttcttcttggtttagtcttgggaggttgtatttgtcaaggaatttatccatttcttctagattttctagtttatttgcatagaggtgtttgtagtattctctgatggtagtttgtatttttgtgggatctgtggttatatctcctttatcattttttattgcatctatttgattcttctctcttttcttctttattagtcttgctagcggtctatcaattctgttgatcttttcaaaaaaccagctcctggattcattaatgttttgaagggtttttggtgtctctatttccttcagttctgctctgattttacttatctcttgctttctgctagcttttgaatgtgtttgctcttgcttttctagttctttcaattgtgatgttagggtgtcaattttggatctttcctgctttctcttgtgggcatttagtgctataaattttcctctacacactgctttgaatgtgtcctagagattctggtatgttgtgtctttgttcttgttggtttcaaagaacatttttatttctgccttcatttctttatgtacccagtagtcaatcaggagcaggttgttcagtttccatgtagttgagtggttttgagtgagtttcttaatcctgagttctggtttgattgcactgtggtctgagacacagtttgctataatttctgttcttttacatttgctgaggagtgctttacttccaactatgtggtcaattttggaataggtgtggtgtggtgctgaaaaaaatgtatattctgttgatttgggttggagagttctgtagatgtctattacgtccacttggtgcagagctgagttcaattcctgggtatccttgttaactttctgtcttgttgatctgtctagtgttgacagtggggtgttaaagtcccccattattattgtgtgggagtctaagtctctttataggtcactcgggacttgctttatgtatctgggtgctcctgtattgggtgcatatatatttaggatagttagctcttcttgttgaattgatccctttaccattatgtaatggccttctttgtctcctttgatctttgttggtttaagtctgttttatcagagactaagattgcaacccctgcctttttttgttttccatttccttggtagatcttcctccatccctttattttgagcctatgtgtgtctctgcacgtgagatgggtttcctgaatacagcacactgatgggtcttgactctttatccattttgccagtctgtgtcttttaattggagcatttagcctatttacatttaaagttaatattgttatgtgtgaatttgttcctgtcattatgatgttagctggttattttgctcgttagttgatgcagtttcttcgtagccttgatggtctttacaatttggcttgtttttacagtggctggtaccagttgtgactttccatgtttagtgcttccttcaggagctcttttagggcaggtctggtggtgacaaaatctctcagcatttgcttgtctgtgaagtattttatttctccttcacttatgaagctttgtttggctggatatgaaattctgggttgagaattcttttctttaaaaatggtgaatattggcccccactgtcttctggcttgtagagtgtctgctgagagatccgctgttagtctgatgggcttccctttgtgggtaacctgatctttctctctggctgcccttaacattttttccttcatttcaactttggtgaatctgacaattatgtgtcttggagttgctcttctcgtggagtatctttgtggcattctctgtatttcctgaatatgaatgttggcctgccttgctagattgtggaagttctcctggataatatcctgcagcgtgttttccaacttggttccattctcctcgtcactgtcaggtacaccaatcagacatagatttggtcttttcacatagtcccatatttcttggaggcttcgttcatttctttctactcttttttctctaaacttcccttctcacttcatttcattcatttcatcttccgtcactgataccctttcttccagttgatcgcatcagctcctgaggcttctgcattcttcatgtagttctctagccttggctttcagctccatcagctcctttaaggacttctctgcattggttattctagttatccattcgtctaattttttttcacagtttttaacttctttgccattggtttgagtttcctcctgtagcttggagtagtttgatcatcttcagccttcttctctcaactcgtcaaagtcattctccatccagctttgttctgttgctggtgaggagctgcattcctttggaggacgagaggtgctctgctttttagagttcccagttttccactctgttttttccccatctttgtggttttatctacttttggtctttgatgatggtgacgtacagatgggtttttggtgtggatgtcctttctgtttgttagttttccttctaacagacaggactctcagctgcaggtctgttggagtttgctagaggtccactccagaccctgttttcctgggtatcagcagcagtggctgcagaacagcggtggctgtagaacagcgaatattggtgaaccgcaaatgctgctgcctgatcgttcatctggaagttttgtctcagaggtgtacccggtcatgtgaggtgtcagtctgccccaactggggggtgcctcccagttaggctgctcaggggtcagggacccacttgaggaggcagtctgcccattctctgatctccagctgcatggtgggagaacaaataccctcttcaaagctgtcagacaaggacatttaagtctgcagatgttactgctgtctttttctttgtctgtgccctgcctccagaggtggagcctacagaggcaggcaggcctccttgagctgtggtgggctccagccagttcaagcttcctggctgctttgtttacctaatcaagcctgggcaattgcaggcgcccttctcccagcctccctgccaccttacagtttgatctcagactgctgtgctagcaatcagtggactctgtgggtgtaggactctctgatccaggtgcgggatataatctcctagtgtgccattttttaagcccattggaaaagcacagtattagggtgggagtgacctgattttccagatgccgtctgtcacccctttctttgactaggaaagagaactccctgaccccttgcacttcccgagtgaggcagtgcctcaccttgcttcagcttgtgcatggtgcactgcacccactgtcctgcacccactgtctggcactccctagtgagatgaacccattacctcaaatggaaatgcagaaatcacacatcttctgtgtcgctcacgctgggagctgtaggccagaactgttcctattcagctatcttggctccaccccaccctagatttaagaatgtaaaccagcttgcatcccctgggacttggtaagtattgaggacaatgaggtgtatggagacaactgcatttcttaatgctctaagggttctgaaaaatctgtacttgccattaggctttttatctggtaacatgagagtattgtaaggggactcttatggctttaataactcatatggcaagaatttggctataaggggttgaatttcccctcatgcttctttccttaatacgtattgtctcttctgagggcgaggagcactaggctgaagttggatttgaatgggggaggtgtttagtgcatttcccaggcccaaacctcaagatttacttgcgacaacacctcaggcggtaaatgtgacagctcattcttaacttcccctgaggggtcaggaacaaaagtaacactttctatgctttatgatctgtgaagttgaccatgacttggtctcctgagtcaataaacctctccccagtaagaggtcaggcattcagacactactaaaaacgcaggcgagaaacccagaggccctggaggacaacttagaagatatgataagcagtgttttggggcttctccatcatgagaagacaggagcccattgtattgaatcaggacagagtcatctgctcccatacctaatacgaagttaacactcctatctgccacttcaagagtcacctgagtctcctccatctctcgatagctaatagtctaatgggagcagaggtaggaagtatcaggccctatcacttttgagtctgctgggctctgatgatggctcccttggaagcacagtacatttccttcaacagtgtctgaccttcttacagaaggcacattgatttgtatccaaggcacattggctcagaggcatagagtgggactttcacattctcacctcctctgtgagggccggggttcaggggctgcctctgaagtggtggagagcacaaggctgcagctagaatctgggcctcttgggagatttgctttattttttgttttctctgccctattcctgtgatggaaaactgcaaaatccaagtctaaaatatgatccatgggagtctggaagcctaaggctgcttttggtgtcttcctgcagatatcagaagcagactgggctgtaaaatatactgctagcaatacctgtcccttcttggggtcagggtcagtgttagtgtatttcctcaaagtctaaattatccacctttttaataaggctaggttttcatcttttccctgagtaattttccagactttataaaaattaaaaagctttatcatacttttttatattccttcaaggagtcaaatgatcataattttttctctatatatcacactttattcctaattcatttgtcttttctagattctagttctcttttgggtcctggtcagacactggtgtgcctcctatttgataggtgtcacatcccccgttgcaggctgccaccctattagcatgtactctagccactcccataatgcactgcttttccaccatgcagcaggtaaacataaatatatgcaaattctgactggtcagattatacatcaaggttagcctcttaaatttgtctatgaattttcccagaacctctgaaaattgttttagtttttccttgcatatggctaattcagacatagaaaagggtacatatacctatatagtgtccttatcatctgtcacttcctagagagggcaaacattcaactttgccagctgataagaggccccactgcatgttgttccagtgaagctcgggtgtttcaagagtggggtatgtatgtaagataggacttgaagggcagggagaagaggatgaccaaactctagataaccctggaaaactagaagaaattaataacgtgttgcacacctcaccagaactggaaggagtctgtgttcttatggagtgcttggactggcagggggagttcagccccagccaagaaaagcctgatattaagagacacttgcattaaaagggtaatccattatgtgccatccctattttgtcttttcctccatcaaacatacagaagcccattttaattttttatccaaaccaaacatcagagaagcctgtatataatgcatttcctcccacttagtttctcttctatgaaacaaattaagctgcaaaataggagtcagatcaaacaggggaaatggggaggctgtaacttgtatattgtaatgtattagtccattttcacactgctgtgataaaatggacaaaagtctctcaggaaaaaagtgacatgctgggtttagaatgtagggtccagctgccctataccagctcatcaaagatgaccttatggttaagaaatgagagaaaactgttaagaaaaagtatcctgttctccatcttgaggttaattgtttgcagagagttgtcataaaagaggctgtcactaaacaggcatatctgatcttatcatgtagggctgttaaataccacatttcaacttctagtcataatgatggagaggttactgctgatcttttctgataattaaggtacaaaaatactaggttccaatacatctgtcttttttcagtgtcactttgaccagtggcaaattaaacaagcaatcagataaaagtcagaggatagttgagggaagtaaaagctaaatggtttggggcctctttcctggggcagcctccaggctactgcaaaacagaggcggtgagcagaaaggtgacaagatgcagagcactcaggtgagtgacagagagcgcaaggtggacagtccaaaaagagaaagtggcaaacatcttgtttagccaaacccattcttctcagtattccccagggcctctaaccctgtgagcttggcctctaatctgaggatgatgcccctgggcctctaacttttggggctgagtctctcaccctaacattatgccttagggtatctcacttaaataatagtggataatcgttcttgcccacctgaacggcttcacgactctaaaagatggcccacttgccagctgattgattctgtgtggattgctttccttggagtgggggtgttgtcttggtgtcccttcatggtattgctgaaagatgttgctggaaaagagggtcctgatacaaaccacaaagtaggatttttagatcttatggagaaaaaattagaggtgagtcagagaacaaagtgaaagaagcaagtttattagaaatgactccattacagagttggacatcctcggaaaacaagggcaggaatgcattgtcttttgttagtgtctctacttataagtaactataaagagaaagagttataattaaacttggaagttgcagatgtactcactaaagtcaaggctattggttttaacaatgaccattaacccattgacctaagctaactcattaatattatccttacaaaaaaatgctgcaatcctaggactcttatacatttttcaggcttggtggaagatgtcttgtacggccacaaatattctgcagttgtaatttgtggccagctaaaaaaatgtggctattttcagaccatgagtattaaccttctagatgccttgtgagtacctagctactcatattaagatagagtattctggtcatgtttgttaaaccagaaggttggtagccatgagttcctctaacagagcaaggttactcctcaaggagaaaatgtatttctcaggaattttctgcattttgtttgatggaatttggtatgtttaccaaaatggcagaaaacagtgaaattagtcctcaaagatttctcaagattggatataaagtaaacaaaatgatagttaatatgcaagttgatgcagttgatattcaaaagaaattttgtttgaaacacaatgagatttttatttttatttatttatttatttatttatttatttatttatttattattattattctgagacagagtcttgctctgttgcccaggctggagtgcagtgcaccatcttggctcactgaaacctccacctcccgggttcaagcaattctcctgcctcagcctcccaagtagctgcgattacaggtgtgcatcatgacacccagctaatttttgtatctttagtagagattgggtttcactccgttggctgggtggtctcaaacccctgaaaacaagcgatctgcccactttgggatgagccaccgctcccagccacaatgaggttttaaaataattctgatttcctgctgttgagcagggagctgagcaaattcaacagatcatgggcctaaagtaggagaagactgaggacaaacactagaatgcatgtgattaaattaactacaattgaaaccaaatcaaatttaataaggctgtacctctgagtttcaagatgtttccccttgttttgaaatgtgatgttattcagtggaaaagaaaactagtgtttttctccagagtaaagaacagggttccctgcagggattgattgactgagagctatggctcaggattaaaaatccttcttttttccacttataaactaaaaataaatttctaagcccctattgactaaatgaacccctcttcttggataaggacactccaaagttaacctgaaagtctagttcaagccatgggtcacgcatgcctcattatactctcctccctttgcttttaattttaatttcaatctttaatttatttttgtaggtacatagttggtgtatatatttatgggggtacatgacatactttgatacaggcatgcaatgagtaatacataataaaaaattggtgtatccatccctcaagcatttatagcttgtgttataaacaatccaattatactcttttagtttttttaatgtataaattatttttgactataatcaccccgttgtgctatcaaatactgtcttattcgttctttctaacaattttttttaaccgatttagcatccccactatccccctgttccctcactgcccttcccagcctctggcaaccatccttatactctcctatctctatgacacctattgttttgaattttagcacccacaaataagtgagaacatgtcacatttgtctttctgtgcctcacttatttcacttaacataaagactttcagttccatttatgttattgaaaatgacaggctctcattctttcttatagctgaatagtactccattgtgtatatgtaccacattttctctatccagtcatctgttgatggacatttaggttccttccaaatcttggctattataaaccatgctgcagcaaacatgagagtgccaatatgtctttgatttaccaattttatttattttaggcatatactgagaagtgggattgctagaccatatagtagctctatttatagttgtatcaggaacatccaaactcttcttaactgtgctcccaacaacagtgtacaagggttcccttcactccacatgctcaccagcatttgtttttgactgacttctgtataaaaacaaccttaactggggtgaaatgatatctcattttgggtttgatttgcatttctatgatgatcagtaatgtggagcaccttttcatttgcctgtttgatatttgaatgtcttcttttcataaatgtttatttaaattttttgtccactctttaattggattattacattttttctatataacattttgaactcaatatattgtagtgtattagtctgtttctgcactgctttaaaaaaaatacccgagactgggttatctatttatttattgagatgaagtcttgatctgttgcccaggctggagtacagtggcacattctcggctcactgcaacctccgcctcctggttcaagcaattctctgcctcagcctcctgagtagctgggattacaggcacctgccagcacacccagctaattttttgccaccatgcctggccaatttttgtatttttagtacagacggggtttcaccatcttggccaggctggtcttgaactcctgacctcgtgatccacctgctcggcctcccaaaatggtgagattacaggtgtgaaccaccgcacctggcaagactgaataatttataaaggaaacaggtttaattaactcacagttccaaatggctggggaggcctcaggaaactcacaatcatggcagatggggaagcaggcacctcttatatgacagcaggcgagagcatgtatgtgaagcaaagggggaagggtcccttagaaaaccatcagatctcatgagaactcactcattatcaggacagcatgggggaaaccaccccgatgatccaatcgccttctaccaggtctctccctcaacatctggggattacaattcaacatgagatttgggtggggacacaaacctaatcatatcaggtagctattaattgcttttcagatggataatttgcaaatattttctcccattctgtggattttctcttcacttgtttattgtttccttcactttaaaaaggctttctgacttgctttaatcccatctgtccacgtttgttttggttgtctgtgcttatgaggcattatttaagaaatttttgcccaaaccaaatgccctaaagagtttccccaatgttttcttgtaaaaatttgatagtttgaggtgttaggtttaagtctttatttcattttaatttgatttttgtatgtggcaagaaatagggttctagttttattcttctgcctatggcttgccagttttcccagccctatttattacaaaacctgtcttatttttattgtatgttcttggcacttttgttgaaaataagtttagtttagctgtatgagtttgtttctaaggtctctatttcattccatttttctttatgtctgtttttatgctagtgtcatgctgttttaattactataagttagtagtataatttaaaaccaggtaatggaattcctcaagttttattttatatactcagcatagctttgactattatgatgttttgtgatggttccatacacatttcagaatttttttttctctttctgtgaggaatgtcgttttattttttagatggtgtctcactctgtcacctagactggagtgcagtgatgtgaccttggctcactgcaacctctgcctcctgggttcaagcaattctctgcctcagcctcctgagtagctgggattacagtcacccgccaccacacccagctaatttttttgtatttttagtagagacggagtttcaccaagttgaccaagatggtcttgaactcctgacctcatgatccacccatctcggcctcccaaagtgctgggattacaggcatgagccactgtccctggctggttattttgatagagatggcatgaaatgtatagattgctttggattgtatggacattttaaaaaatactgattcctccaatctgtgaacataaaaatatctttccaattttggggtcctctttcatttcttttatcagtgtttttcagtttcagttgttgagaacttttatttctttggtaaattcccacacattttgtttcatttgtggctactgcaaatagtattacatttttgaattctttttcagtttgttgactcttggcatatagaaatcctactgatttgtatatgttgattttgtattctgcaaatttactcaagttattactgctaatagttttttggtggatgtattaggccattctcacattgctataaaaaataatcagtgactggttaatttataaagaaaataggtttaattggcttatggttctacagagtttacagaaagcatagcactggcttccgcttctggggaagcctctgacaactgacaaggtgaaaaataaatccagtgcttgcacatcacatggtaagtgtgagggcagggaggatgatgttctacacacacttgtagataaccagctctcatgaaagctaactgttgttggaatggcaccaaaggaaatgatgccaaactgttcatggaaatcctgctgtcatgattcaatcacctccccactaggcccacttccaacattgaggattacatttcagtataagattttgtgggaactcacacccaaactatatcattttgcccctggccattgcaaatctcatatccttctcatatttcaaaatacaatcatgacttcccaataatccccaaagtcttaactcatttcagccttaactcaaaagtcaaaagtctcatctaagacaaagctagtttcttcctcctacaaacctgtaaaatagaaaacaagttaggtacttccaagatacaaatggggcagaggcattgggtaaataatcctattctaaaaggaagaaatcagtcaaaagaaatggaccacaggacccatgaaagtctgaaacccagaagggcagttattgaattgtaaggctccaaaataataatttttgactctgtgtcccactttcagggcacactgatgctttgggaagggtctaccttgtgcctttgcatggttcagcccccaaagctgctctcatgggccggcattgtgtacctctgactggtattgtgtgcctctggcttttctaggtgcaaggtgcaagctgtagctagatctaccattatggggtctggagaacattgatcttctcctcacagatctcctaggccatgccccagtggggagcctgcctggggactgtcaccccacatttcttttctcaattatttttgtagaggttctccatgagggctccacccctgcagaatgcttcttcctgcacaccctggctttttcatacatcctttgaaataaatgtggaggttcccaagtcttaactcttgcattttgtatacccacaggcctaacaccaaatggaagctaccaaggctatggcttgctccccctgaagcagtgactggagttgtaactaagtcaatttgacctacacctggagctgaagcagtgaccaggatgcagggagccatgttccaaatctacccaaggcagcaggtcctgggcctgatcccagaaactgttctcttcttttaggcctcagggcccatgatggtgggctgcctttcatatttctaaaattccttcaattcctctttcccattgtcttggctatcaacacttgcttttttttttttaggttatacaaatatctctaacaagtagttgctccatagcctgcttgagttcttctcttataaaagcttttttatttttcagccacatgactaggctgcaaagttttcaagcttttacactatgcttcccttgtaagtttaagttacaaccttttttttttttttttttttttttttttttttgctagaacatgtaagcataggttgttagaagcagccaggccacatctcaaatgctttgctgtttagacatttttccaacagaaaccataaattgttgcaggaagtcagggaccccaaatggaggaaccggctgaagctgtgacagaagaacatggattatgaagattttatgaacatttattagtttcccaaattaatacttttgtaatttcttatgcctgtctttactgcaatctgtaaacataaattgtaaagatttcatggacacttttcgcttccccaatcaatacccttgtgatttcctatgcctgtctttactttaatctcttaatcctgtcagccgagaaggatgtgtatcatctcaggaccctgtaataattgcgttaagtacacaaattgtacagcatgtgtgtttgaccgatatgaaatgtgggcaccctgaaaaaagaacaggataagagcaattgttcagggaataagacagataaccttaaactctgactgctggtgagccgggcagaacagagccatatttctcttctttcaaaagcaaatgggaaaaatatcactgaattctttttctcagcatggaacttccctgagaaagagaatgcgcacctaggggtaggtctctgagctggcccccccggggcatacctgtctcttatggtcgatattgcagagatgaaataaactccagcctcccatagcactcccaggcttattaggaagaggaaattcctacctaataaattttggtcagatctcaaaaccctgtctcctgataagatgttatcaacgacaatggtgccagaaacttcattagcaattttaatttcacctccattctgtggtcctgtgatctcgccctgcctccacttgccttgtgatattctattaccctgttaagtacttgatgtctgtcacccacacctattcgtatactccctccccttttgaaactccctaaaaaaacttgcttgtttttgtggcttgtggggaatcacggatcctaccaacctgtgatgtctcccctggatgcccagctttaaaatttctctcttttgtactctgtccccttatttctcaagccagccaatgcttaggaaaatagaaaagaacctacgtgattgtcggggcaggtcccccaataataaatcattaatttcaaattcaaacttttatatatccctagggcatgacagaaattcagccaaccactttgctaagacaacatgtgtgacctttgtttcaggcctaattagtttctaattttcatctgagacctcttcagcccagccttcactgtccagatcactatcagcattttggtctcagccattcaaccagtctctaagaaaatctcaactttccctcatttttctgtcttcttctgaatcctacaaactcttccaacctctgcctgtttacccaattacaaagctgattccacattttcaggtattcttataagaagtttccactccttggtgccaattttatgtattaagctatttttgcatcactctaagagtgggactggataatttatttttaaaaaaggaggtttaagtggctcctggttctacaggctgtagagaagacatagcactggcatatgctcctggggtgggctgtggaaatttacagtcatggcagaagttgaagcagaatcttacacatcacacagcaaaaagcaggagtgaaaaacagaggtgcaagttgttacacacttttaaataaccagatcttataggaactcacttactattatgaggatagtaccaaatgggatggtgctaagccatttatgagtaatccaccccaatgattaaatcacctttcaccaggcccacctccaacattgagaataacatttaaatatgagatttgggaggggacacacattcaaaccctatcagaggagtctttttttttttttgccaatatgagattatatcattggcaaaaaaagataatttgacttcttttccaattgggatgccttttattgctttctcttgtctgattgctccagataggaatttcagaattatgttgaataacagtggtaaaagtggacattcttgtcatcttccagattttagatgaaaggattttagtttttccccacttagtatgatactagctgtgaatctgtcatatatgaattttatcatgttgaggtatgttcattccatacccagttttcaaagagttttttattattaaagaatattaaattttatcaaatattttttagtataattgaaatgattatatggattttgtccttggtttttttttttgtttttttgtttttttgtttttttgaaatgacatctccctctgtcacccaggctggagtgcgatggcatgatctcagcccactgcaacctctgtctcctgggttcaagtgattctcttgcttcagcctcccgagtagctgggattacaggcacccacaaccgtgcctggttaatttttgtatttttagtagagacagggtttcgccatgttggccatactggtttagaactcctgaactcaggtgatctgcccacctcggcttcccaaagtgctgggattacaggcgtgaaccactgtgcctggccccttcattctgtttatgtgatgtatcacattgattgatttgcatgtcgaaccatccttgcatccctgggataaattccacttggtcattatgaattacctgtttatgtgttgtttaattcagtttgctaggttttttgcaaatttttgcaccaatattctcagatatgggcctgtagtttgcttttttaatgggtctttgtctggttttgatatcagggtaatactagcctcaaagaatgagtttggaaatgttctttccttttctatttttcagtctggtcttacagacttttttattaagactttaattttgtaaattgttattggtctgttcaggttttagattttttcctagttcaatcttggtaagttgtgtttgtctaagaattaattgtctgtaggttttctaatttgttggcacacaattgctgatagtaaccactaataatccttgattttctgaagcattacttgtaaggtctcctttttcacctctgattttactaatttttatcttctctgttttttagttagcctgtctaaatattgtcaattgttttacttttcaaaaaatcaactttttgtttattagtcttttgcattgttttcttcattttaactttatttacttctgctgtaatctttattatttcttttcttctaattttggatttggcttggcctttttattctagttaattaagatgtgttgttaggttatttatttgaagcttttctgttttttatgtcggcacttacagttataaattttccttttataatagtacctcttttactatattccataggttttgctatgctatgtttccattatcatttgtttcaagaaatttttctgttttcttcttaacttttttatcgacctactaatcattcaggagcatattgtttaatgtccttgtgtttgtatagtttctgaaattccttttttaattgatttatagttttattccctgtagtcagagaaaatgctcgatattacttcaattttttggaatgtctttagacttgttagttaacatatatatagtctatccttgagaataacccatgtgctgaggagaacaatgtatattctgcagctgttggatgaaattttctgtaaatatctattaagttcatttgttctgtagtgcaaattaagtctgatgtttctttgttgattttctgtttggaaggtctatccaataactaaagtagggtgttgaagtgtccagccattattgcattgaggtctctttctttagctcttataatatttggtttatttatctaggtgctttagtgttgggtgtatatatgtgctcaattattatattctcttgatgaattgatctctttattattatataatgacctttttaatctcttcctacagtcttttgttgaaatctatttttatctggtataagtacagctatttcttctcttttttggtttctattggcatggaataactttttccatccttttattttcagtctaaatgtatctttatagttaaagtatgtttttggtaggtcacagattattgtcctgcttctctatacattcatccactatttttcttttgactggagtatttagttcatttacattcaatgttattattgataagcacttactcctgccattttgttatttgttttctgattgatttttgtcctctcttccttctttcctttcttcctgtcttccttttagtgaaggtgatttctcttgtattataatctaatttcttgttttttactttttgtacgtctgtggtacactttttgatttgaaattaccatgaggcttgaaaataatataatacatgattttagactgtggacaatttaacacggattgcatcaacaaagaaacaagcaaaacaactaatacaaactctatactttattgccattcttttaacctttttgttgtttctcttcattccctattttactgtctatgtcttcgaaatatgttgtagttattattttcattggtttattgtttactctttctatttgagatttttgcaccccataattaccatgttataatattcagtgtttttccatgtgctattgctagtgcgttctgtaccttcagatgatttattattgctcactaacttcttttcttttaggtctagaaatccctttagcatttcctgtagtacaggtctggtgttaatgaaatccctcagtttttgtttgtcgggaaaagttctatttctccatcaagtttaaaggaagtatttgccagatacattattctaaagtaaaagtctttctttttcagcttttttaatatgtcacgccagtctcccagcttgtaaattttcccctgaaaagtctgctgtcagatgtattggagttccattgaatgttatttgtttctcttctctggatgcttttagaatcatttcttcatccttaacctttggaagttcagttaagtgccttgaggtggtattctttgggttaaatctgctttatgttttgtaactttctgttactcaaatgttgatatctaatgttgatatcaaatgttgaattgtttaatattatttaatattatttatttaaataaatgttcaactcatctctttttctacctcttctttaaggccaataactcttagatttgctattttgaggctattttttagattctgtaggcatgctttattttttattcttttttgtctcctctgactttgtatttttaaatagtctgacttcaagttcactaaacctatcttctccttgatcaattattttaagtaattctgatccattcttcagtatgacaatatcattttaacttccgaatttctgctttattctttttatttcaatctcattgttaaatttatctgatagaattttgaattccttccctgtgttatatcgtatttctttgaattacctcaaccagctattttgcacttcctgtatgaaatgtcacatacctctctttttccaggatttgtccctggtgctttttttagcttctttggtgaggtcatgttttcctggatgtccttgatacttgtagatgttcatctatatctgggcagtgaagaattcagtctttatcgtagtcttcacagtctgggcttgtttgtgcccattatctttgggaacactttccaggtattcaaagaaacttgggtcccaaaccggcagtctctctttctgtgctgagacatatggagctggggttggggtaacataagcacccctggggccaccaccactgagactgtgctggttcacacctgaagtaggcacagaacttggtctcacccacggcccactgtaaccactacttggctaccatataagattattcaaagccctaggactctgtgattaataggaggcaaagccagccaggtttgtgtctcatagaatcttcaaaatttacctgctcttctattttactgtagctaacctggcacttagggaataagacaaagtattttctactcttccttcccctgtctgcagtcagaagagcctcttctatgactgtcaacgctactggcccatgggagggttccacaaaatcatcatcactttctcacttaaagcccaaggactctttagttagcttgtgataaattctgcaatgcctgggactggacctttggcccagggcaagtgcagaaatgctgaccaataccctagtcctggagtcagggactctaagaatctgcttgttgctctaccccactgtggttgagctggtatatcaggcgcaatacagagttccctttactttcccccctgcttttctcaaacagaagaagtctttaaccatagctaccacagctagaaatgcactgggtctcacctgaagttagcacttctcagagcccaatgcccatggtgtattacctggttgtcactgttttttattctgggtacaggggttctttagtcagcaggtgatgaattctgccaggtctttactgacatggcagcactgagtttaatgtaaagtcctctagtcccccaaattcacaggtttctctgtgttgtgtggttgctgctgggtggggggtgggggagtggtgttgtgagcactcccttagctacttcagctgctgtctcagtagaccccatactccccaccctccacattctactggctctgagcccagctaggagtatgacttgcctaataattgaagtccttgtggcctagactgccccttcatttctcctagagtccaatagcacgtcaacacatgatggcaagacttgtaaaaactcaagctcccaacaccaggatgggagattttcctcttgctagtgccaatacaaatgctccctccattggcagatgtcagctgagtacagtctggttctgcttttcactgtgacggcgtagtactgagtttattgcaaagcctcacaaactatgctcttcctctcccaaacatactatctctgcaccatgtagccactacttgtggttgaaaaagaggtggcatccgtgtttctagaccatcttttttttttttttttgtcttctccaatgtctctttcagtgatacgaatttaataccaggtactgtgattgctcacccaatttttggtccctttgacagtgctccttgaatgtagtgagttgtgaaaatttggtgtttttgtgtgggcgacgagagtgtaggcttctattctgccctcttactctgtctctgtcttaaattttttagattcagggagtacatttgcacgtttgttacatggatatattgtgtgatgctgagctagctgggatattattgatcccatcaccaaggtagtgagcatatattgtggaatataattgatcccatcacctaagcagtaagcatagcacccatagtttctcaccctctgccctcctccttctctccttcatctagtagttctcagtgtctattgttgtcatctttctattcatgagtaccccatgtttagattctacttataggcaagaacgtgtggtatttggttttctgttcctgtattaatttccttaggataatggcctccagacgatgcatgttgctgcacaggacatgactgtattctttttaatgtgtgcatagtattttatggtgtatatgtggcacatatttctatccaatttattgattcatacataagttaattccatgccttccctattgtgaatagcaatatgacgaatatacaagagcgtgtggggtctctttttgtagaatttttaattttcttttggatatatactcagtaatggaattgctggttgaatggtacttctgttttaaattctttgaaaaatctccaaactgcttttcacagtggctgaactaatttacattcttaccaatagtgtataagcatttcattttctctgaagtctagccagaatttgttattttttacttattaatagtagccattctgactaatatgagatggtatctcacattgatttgcacttctctgatgattagtgatgttgaacattaagaaaacaacccattaaaacattgacaaggtacataagaagacacttctcaaaagaagacgagctgggcacagtggatcacgcctgtaatcgcagcactttgggaggccggggtgggtggatcacaaggtcaggagatcgagaccatcctggctaacacggtgaaaccccgtctctacaaacaatacaaaaaattagtcagacgtggtggcgggcgcctgtagtcccagctactcaggaggctgaggcaggagaatagcgtgaatcggggaggcagagcttgcagtgagccaagatcgcaccactgcactccagcctgggtgacagagcgagattccgtctcaaaaaaaaaaaaaaaaaaagatatagaagtgggattcttattctatcacaataagctgcctttcctttgcaaatacaaaatcaaaccatttgaaaaatcactttaattgtagggtttgacggtatgtttccccttctctatctcctttcctcttttgtgatttttttttttctgatcactatgaatccactcagcagattaacttccattcttaatctgtgtgaattgtgctgatgagatagtcagctctcttaaaatcgctaacaaaaaagttttaaatttcctagctagtaatacatttttagcatgccacaggatactcttagagtaaggacttctggtccaggcattatggattatgatgattagttctctggatttctataagctttgaaattaagaggtaaaagatctaacataaattggacttcatactatttatacatttatttggtttgttaattattccataggaaaacagatgaaagacttctgtagaattcaattctgtttcactatatttagggttacaagaagggaattatattgatgtgattgacagactgaattaacctcagtcatcacatgtaatttttctagagttttttcatggtactgacattcttttcagtatgtcaatgcctagcttgggtttcttggggagagatgaatagctagtactacccatctaaaacataatgttcattagttggaataatggtgtgatatgatagtcttcaatatgtccatgactagcttgggtttctgggggagacatgagtagctagtactacccatctaaaacataatgttcattagctggaataatggtgtgatatgatagtcttcaagatgatgccctcaatttctttcctccctgcatgcacatgctgctctttaccttgacaggtagagtctactctcctatttcttgaatctgtgctggtcacaatgacttgctttaccaataggatgcagcagaggtcatattctaggacctccaaggccaggtcataagaagctttgtagtatttgcctgtgtgtcttggaacaaactaccacgttctgaggactccaggtaacatggagaggacagatagacatcacactcagcagccaatatgcactgccagccatgtgagtgacctgtctaggctctttagcctagctgagctttcaggtgacttcagcagcagccaaccaaccgcaactgcaagaaggactccaaaagagaacttttgtagtgcccgtcaacccacaaaaccatgagaaataacgttatttaaaattactaaacaaataataacaataaacaatattaaaccataaataattccttaagttttggaatggcttactattcagcaagagatagctagaacaagtactaaatattgcacaatactgaacaagtgtaagtttagttgtataatatacttctatattttaaagccattgacatttctgataagggtgtaaaagtgagcactgattaaatggttcccaagagaagttgcctgttgtatctcaatatcatcatttaccaatgggagctgtatttagtttttggaaaatatacattttaatgttcattttaaaaaatatactaacaattgtttagaaaggcatatgctattttgaaaaacatttgagtgaaccagaaaagtgtaaactttaaggctctaatcatatttgtatgctatttaacccacaaatccaaagtctgatggcaaatatgtttgtgtaatactgatatttggataaataagttaaactaacagttttctttttaaatgataggccttataattggtatgatgttgagatggctgcagtggatgggctcatcaccataataatgttttctctttaatacttttttagaacattaagtgacaaccagagagtctaaaactgggttacacagcagtaataaaatcagagtgacacttactttgcagcagcaggactggaattcttgctattggggttggtggcagcaaactcaattatgggtgtcttctgcttcatgcttagaaggtgtgttggaatatttcctgtttagaactttctaacacttcctgactagagctgtttaaaatagaaacaaacccctctgattttgaatttagcctatttattgttataatttgttcatatgtttctactttttagactgtggctttcttgtagacagaagttatatcttatacctctttttcttcagcagcggtgtgcctggcacctagctgaattgtcaggttcattgaataagtaaagtaaaattatactacaagtaaactattaaatttatcaattttactcagaaaatatatagctaagtatgacatttgaatcaattcactcatttattcaacaaacattttttaagtgactacagcatgctatgagctaggaatatggcagtaaacaaatctcaccttgtctcaaacttcagtggatccgggattctctagaagtttaattcttgctcaatcagcaattccttttcactgaagacttgacaagaaggtttgagaaggcaagagtgtgtgaactcagcagatgttagtgattcacctactgtgtgccagctgtagtgtcgtagggtcagcctgtgtcttctaggaaaggtgaaaactaaggacaatattttaaacaacaaataatgccaagtatgccacgtgatggagaaggaaagcgctgagtcccaagagtataacaggcactgagcctcgcgtggggtccaggcctctctggcatggtgccctcctaggtcgtggttgtcctttcttattgctcctgctgtcttcttcagttacatctgcttctctgcatttcctcattttaccgtatgtgggatgcagtcatctctggacaggaataggcaactgtgcacctgttatgccgtgcttgatgctctgcattgatgtacactgggcccagttttccctggtggactgcttgggctgttcttgtcttctggctctgaagactttgttcacagaggtgcacttgccagacgggggagccagagatctggggtcctctgatgaggccactctcaccctgcttatcttccctgacataaccaacagacgaagctcaggtgggcgatgcacctcaggccacagtgtggactgttgtaaccaagcgagttatagaggaacaccacactttgagacaaattaaggagtcctttattagccggcgaccgagaggcagctaacgctcaaaattctctcggccccgaggaaggggctggttttcttttataccgtggtctaaataggcgaggggggagtttggctgaagcaatttttacagaagcagagctggcaaaaagttaaaaaattaattggttacaaaagcagttgcaataaaataaacagttctaggtgcaggggcttaaactatcacaaagagagaaatgcaggggttttgggtgccattcaccgagtgagtccccaggagctgctggtgcagcttgcctcaatatcttatcagtaagtgattcctggaagtgctttgagtcagtttacactagttatgcccttaagggagggacgtaaagggggctgcacgtgaagaaactaaaatggagtctgtccagctctctgctaggagaaagtcactcaggttaaaataagttagggtatcactggaccatgtagaattcttcaagctccagcttcaactctctttcttattgctgtcttaggacagtatatttagatgggagtaaatgaaagtaatgttattaggggataagattaaaattgatcccatttgtaaaaaaggaagtagattatttgtgaactgtaatactttattttagtgaagaatcaccttaaaacttgaacctgagtacaagataattccttcattccgcaaatgtttagtagcaaactatatgccaggactgtgctaggtactagggatatatggttgaacatatagtataagatgccttggagcatcagatagtttcacataaatggtctcatacagtatatagaccgtgtggtaaaaagagactactgagatgcacagaggacagaaaataaagggtctttgaatggcgtataaatgtgtttggacttttcactcagggctgttgaagttttggaaggtcagtggtctcagagttttggtgttttcaagcactgctaaatactttgtttctagctgatgattggccaccattactgatcatctatttgctctgtctgattcagcaatcccaccactgggtatctatgcaaaggaaaagaaatcaatgtatcagaaagataactacttatatatttgttgcaacactaatcacagtagcacaggtataaaatcaacctaaatgtccatcaacaaatgattggataaagaaaatgtagaaaatatacaaaatgaaatactattcaggcacaaaaaatagaatcataacttttgcagacacatggatggaactggaggccattgttgtaagtgaagcaagccagacacagagtaaacatcgtattttatcactcataagcgggtgctaaaagatgtgtaggtattgatgtagagagtggaatgataatggagactcagcagggtgaggggatagaaggggtgaatagtgagaaattacttaatgggtacaatgtgcattattctggtgatggataccctaaaagccctgactctctactatgccatccatgcttacagcaaaattgcacttagaacccataaatttatacacaaaaagtcttagacctctctctcttctctcataagcctcagagctcagtgatccccttggatctcctcagcctgctgagttgtgattttcctacctaaggtgattttgggcagagacaagggagtgtttcaggaagatgttctcaggcacacgcttctgcagaagcattggaggctcttctagtggcctttatctagtcactgctttaagcaaggaataaaacatctgtggctaaaatttaaaaaactgtgttttccacccacccttcagacctgacagaagatattttaggattttaagggaacagctttttcctgacccaaaagggcacagtagtgcaaaggctaatgtcacgtaagtactttttccccatctttaaaataactttcagatactattcccacagttggaatcagtacaatgttttgactgaggtattggaaaagcctatgagctcattatcatttgaacgtatgagtaatgtaaaatttaggcagaattttatttgaaaggattatttatgcaattttaaattaactgatttatattgtggttatttcaaacaataaaaatcaggttgttgtgttgtgagctagaaatatttacaataacacatgatcttgattatctcacatgatgaattgaagattaaagctaaataatttatcttagggaattctgtgacagttttgtttcactttgcttaataatgacttcaaactgttgtacatatatagagaactcctgactgaagagaatttttttgactattgtgctatgtttctgtaactttttaagatctagaggaacatatatttagtctcagttggccaactaaatgttatggagtcagcttctgtgttatgttctgagcattgaaggaacggtggagacaaggctgctgccctcgcagagtctgtggagaaaacctgatggagtgtggcagcgaacatgctgggagcatcccaggatgacaaaagtgcacacagatggaacatctgccttagaacaggggagggtcagacaaggagaggtgtcaggaaaaacaaggaaagtttaatctgcaggaatagaaacacacttgggaaatccatggggactgaaaagagaatggctgagcagcagcagattgtcaaaaaggaaatcaagaaggagcagcctaagaggttgatagagaaccaggagaaagaatgtgacactgaagccaagggaaggaaagtgtttcaacatttctgggaaaaaaatgacatgctctgtcttaaccttgctgttttatgagtcatatagccacattccaggttctgagaagtccagcactaaagatgtttcttttagtttgcttaacccagcatttgccagaataatctgggctcagtgtgagtgtgtgtgcgtgtgtgtgcctgtgtgttccactaatatctcactggggctaatgctctatacaacataatttttaaaacactggttttatccatcttatgttcagctgcagcaatacttacaaaggtcaactttgatcacgtgtcttagttactaaagaaaacaaaacaaactaatgaataaagcccacctgacagtggatcctcactacctgtacgatggagcccacctggcttggcctgggtgccctgtgctgacctggtcttgctgccctctgcctgctgctttgccgccactttcctcctggagaaggtagagatgctctgagctttggcctgtctggaacatgtgtccttctcctaacgcggaccatgttttcccgagtgcactttaatctcttttaagggtatagaactttccttaaagcttttggtcaggtctccctctctatgcagtcttccggccacttctacaatgtacatactttactgatacattaattatgctataccagcccaggactttacttatgtatcattttatatcaccatctttttttcttagagcttagttcacttatttattcagtctttccacaatataattgtatgtcatataattttatatttattttcattggtatttataagtcttttctgtaaaaatagaagctaagtagatcttcattaatgttgaaagaacaaggttttaagtcttggtctcagccaaaagcagttccctgcatatccaggagggaaagaatcacttgcattgttgcattagatattcttacagagaaagagaaccacgtgtaatggaaaattgctaactttgcctcagggagaccaggttgattcactgagaaagtttgaattggtttagaaagcatagttctgagttttctaggagaagtagaaaagttagagtagggcataagaagtaatccccatatcaaaaagttagaaagatctcaaattaacaacctaacatcacaactgaaagaattagagaagcaagaagaactcaaccacaaagcttatagaagataagaaataactaaaatcagagctgaattgaaagaaattgagacaagaaagcgttcaaaagatcacttaatcaaggtttttgaaaaaaattagtaagatagataggcactagctagactaataaagaagaaaagagagaagattcaaggaaacacaattagaaatgctgaagggaatgttaccactgaccccagagaaataaaaataacaaccagcaactactatgaacacctctgcacacacaaactagaaactctagaagagatgaataaattcctggacatctacactctctcaagactgaaccaggaagaaattcagtctctgaacagaccaactgtgagctccaaaaattcaatccgtaataaatagcctaccaacctcccaaaaaagcccaggacctgatagattaacaaattttaacagatgtacaaagaagagccagtaccagtcctactaaaattatttcaagaaatagaggagaagggactcttccccaacttgttctatgaggccagcatcatcctgataccaaagcctggcagtgacacaacaaaaaaagaaagcttcagaccagtatccttgatgaacatccattcaataatccacaacaaaatacttgcaaactgaatctagcaacacatcaaaagactaattcaccatagtgaagtaagcttcttccctggaatggaaggttggtccatcatgggcaaatcaataagatgtgattcataacataaataaaactaaagataagaaccatgtgattgtctcaacagatgcagagaaggctttcagtaaaattcaacaaatcttcattttaaaaattctcaataaacgaggtatcaaaggagcatacctcaaaataataaaggccacctatgacaaactcacatccaacattatactaaatgggcaaaatctggaagcattctccttgaaacccgcacaagacaaggatgccctctctcatcactcctattcaacatagtattagaagtcctttctggagcaatcagacaagagaaagaaataaaggtatttaaatagaaagagaagtccaactacctctgtttgcagacaatataattatctatctaaaccctatagttgtgacccaaaagctccttaagctgataaacaacttccacaaagtttcaggatacaaaatcaatgtacaaaatttgctagcattcctatacaccaagaagagccaaattaaaagtcaaatcagagaggcaattttaatcacaatttccacaaaaagaataaaatacgtacaaatacacctaaccagggaggtgaaaaatctctacaatgaaaattataaaacactgctcaaagaagtcagagaagacacaaacaaatgaaaaatcattccatgttaatagaaagaaagaagtaatatcatttaaatggtcatactgcccaaagctattcctattaaactaccaatgacatgcttcacagaagtagataaagctatttaaaaattcatatagaaccaagaaagaacctaagtagccaaggcaatcctaagcaaaaagaacaaagcttgaggcatcacattacctgactttaaactatactacagcactatagtaaccaaaacagcatggtactagtacaaaaacagacacatacaccaatggaacagaatagagagcttagaaataagaccacataactacaactatctaatctttgacaaagctggcaaaaacaagcaatggggaaaagatgccctattcaataaatggtgctgtgataactggctagccatatgcagaagattgaagttggactgcttccttataccatacacaaaaatcaactcaagatggattaaatacttaaatgtaaaacccaaaactataaaatctctggaagacaacataggcaataccatcctggacatagaaacaggcaaagatttcatgataaagacaccaaaaacaacaaacgcaactattgacaaacgcaactattgacaagtgagatctaattaaacttaaaatcttctgctcagcaaaaaaaattatcaatagagtgaacagacaacctatagaatgagaaaaaatatttacaaactatgtatctgacaaagatctaatattcaatataaggaacttaaatttataagagaaaaacaaacaaccttattaaaaagtggccaaagaattgtctattcatgtccttagcctactttttgatgggattgtttgttttttcttgctaatttgtttgagctcgttgtagattctggatattatttctttgtcagatatacagattgtgaagattttctcccattctgtggattttctgttaactctgctgactgttccttttgccgtgaaaaagctctttagtttaattaaatcccacctatttatctttgtttttcttgcatttgctgttgggttcttggtcatgaaatccttgctaagccaatgtctagaagggtgtttttgatgtcatcttctagaatttttatactttcaggtcctagatttaagtccttgatccatcttgagttgatttttgtataaggtgagagataaagatcaagtttcattcccctacttgtggcttgccaattatcccagcaccatttgttgggtagggtgttctttccccactttgtttttgtttgctttgtcaaagatcagttggttgtaaatatttgggttaatttctgggttctccattatgttccatttgtctacgtgcctgtttttataccagaaccatgctgttttggtgactatggtcttatgatacagtttgaaatcaggtaatgtgatgccttctgatttgttctttttgtttagtattgctttggctatgtgggctcttttttgttccatatgaattttaggactgttttttctagttctgtgaagaatgatgatggttttttgatggcaattgcattgaatttgtagattgcttttggcagtatggtcatagacaattctcagaagatatacaaatggccaacaaacatatgaaaatatgctcaacattactaatgatcagggaaatgcaaattacaaccacaatgtgataccaccttattctctcaagaatggtcataataaaaaaaaaatagatgttggtgtgaatgtagtgaaaaggaaacacttctacactgctggttggaatgtaaactagtacaatcactatggacagcagtgtggagattccttaaagaactaaaagtagaagtactatttgacccaccaatcccactactggctatgtacccagaggaaaaaaaaagtcattatccaaaaaagataccttcacacatatatttatagcagcacaatttgcaattgcaaaaatatagaaccaatccaaatgcccatcaatcaatgagtggatgaagaaatcatggtatatatgcacaatggaatactactcagccataaagaggaaatgaattaatggcagttgcagcaacctggatgggattgaagactattattctaagtgaagtaactcaggaatggagaaccaaacatcatatattctcacttataattgggagctaagctataaggattcaaaaccttaagaatgacacaatagactttggggactcagggagaaatgggagaacggtgtgagtgataaaaggctacaaattgggttcagtgtattcagatgaggtggtggatgcaccaaaatcttacaaatctataaagaacttactaatgtaaccaaatgccacctgttgtcctaaaacctatggaaataaaaaaatgtttaaaaagtgggcaaaggacatgaacacttttcaaaagaatacatacatgtgaccaacaaccatagaatacaaagctcaatatcactgatcattagagaaatgcaaatccaaggcacagtgagacaccatctcacactagtcagaatggctattatgaaaaagtaaaaaaataacagatgctggcaaggttgtggagaaagagaacacacacacagttggtgggagtgtacattggtcccaccattgtggaaagcacaacagtgttctcctcgaaagatataaaagcagaactatcacttgacccagcaatctcattactgggtatatacccagaggtgtataaattgttctatcataaagacacaagaacataaatgttgcagcactattcacaatagtaaagacacggaatcaacctaaatgcccaatgacagattggatacagataatatggcacattgtgcaggaaaatttaaatattaaacttgatctctattgaacagggacagaaacaatggtcactaagtcctggaacgagttgtgtgagccccttgaggcattcatccagtgttgttattattgtagtttttattattgtatatttttgtatttttttattattgtatttttattgtattgtatttagtattgtagttgttattattgtattattaagtagttattgaaaaacaacagacaatggcaaaaacaagttgactttttgtattccttgagcccagtcacgaagggccttcaggactgggcctcatgacaaacaacttgttacaaaaagagctcggttcccagaccacgctgaaggttcatgggacctctcctcgtctgtgcatggactgctggccaactctggagcccaggctgttgcttcctggtctggtgatgaatcctccatagtctggcgagtgtaaaacaaaaatatatatatatatgtgtgtgtgtgtatatatatatatatatatatatatatatatacacacatatatatacacatacatacgtatatatacacacatatatgtatatacatatatacgtatatatgtacatatatagatatatgtacatagatatatgtacatatatcgatatatgtacatatatacgtatatatgtacatatacgtatatatgtacatatatagatatatgtacatatatacgtatatgtacatatacatatatatgcaaatatacgtatatatattacatatatatacacatatatacgtatatatattacatatatatacacacacacatatatatacacattttcccttctccccttcccattacaatttgtttattgtatcatttgcttattatatctatattgccatatacttgggataaagtctgtttacccttaaaagtattgtgtgtttcttttcttctttcctcacacatttcccacacagaacacacataagcaccatggaatactatgcagttatgtgttcacacttataggtgggagctaaataatgagaacttatgaacacaaagaaggaaacaacagacaacagacactggggtctacttgaggggggaaggtgggaagagggaaaggaacagaaaagataactatggggtattgggcttaatacctgggttatgaaataatctgtataacaagcccctgtgatacgagtttgtctatgtaacaaaccttcacctgttcccccgagcctaaaataaaaaattttttaatcctttatgaaagctataagatctgctcctgtgtgtttgtatgtctatatgtgttacatgtatgtgataatattttgtaaaagctcattcttaaatcattagtaaaatagaaatggctttataattatccattaaaaataattagatatttgcttgatttaactgtgagcttatatcttccgttgagagtttctggattcagggggtcttgataggtgaccatgatgaagtacggagacacgttctcagtgcctagatcagcagctaaaagccagaatcaagcccaaatcggccccttctttccatgctttccctgttttgccttctggctattttagaaggggttggatcctccaggtatagtcttcacagctctgtctttagtcctaatggactcaggcaggccctgatcttcacagttttcctgggtgccatgtggctacttgggacctaaaattactgagggaagacattatggatgctacctgtgtcatggtttcaaaattctgttcagtaatttaaaatcttaaattcacattaaattaagtaatagccgtaaaatatcttgagtcatttgtaagctaaaatagtgaaatattaaccattaaaaattagtttagttctatataccatgacatgttacttgaatatggtacagaaaacctaaatatctttagttctgttaataaacagtaatttgaagaattatatttcttaaaagttgtaaaatggtttttatctaaaaatactgacataagacagttgagaaatcactttgtaggggtttcattgaatattgggactcctaagacttaattactagatacgagagaaacaattctgcatacagagtgtataaaaagcaagatatgccttatttttcttttttgagactgagtcttgttctgttgcccaggctggtatgcagtggcatgatctcagctcactacaacctctgcctccccggttcaagtgattcacctgcctcagcctcccaagtagctgggattacaggtgctctccaccacacccagctaatttttgtatttttagtagagacagagtttcaccatgttgaccaggctggtcttgaacccctgacctcaagtgatgcacctgccctggcctcccaaattgttgggactataggattgtgaaaatatgtttttgatgataaaacttataaatccataaaactgtgttttaatttttttttggtttgaagttacttaaaggtttcaaattgaagaagtaaaaaaactagataaaactagataaatatagaaagttgggggaaaatgcaaagcataggttcacaaaaatctgggattaaaagataacaaaatttgataaatgcatttataaagttttattaaattagctttagaggccaggcgctgtggctcatgcctataaataataaaattttcttgtcaattgtatctgactatgacaacttaaagtgatttctacagtaaattgcttaattctgaggcagtttctgaaaactttacaagcttgcaaaatcctggaatattgtatccttaaggaggttcatgaaaggatggagaaggccctgagaagcactcttgaatacaggtttttgagaactttagaatgatattatttgaactgggtaagaattcccagaactttaatgaagagactaactggttaatacaactgctaacccaagcagaataaaaatcaattgaataccaagaaaacactttgccagattttcatgccaaatcagctagtacttaaattgtctagataaagaatttgaatgaacggcatagtccaagtcaaattatctatgataatccctgattagtcagtgctatgcacctaagttgaagaaagagtccaatgttaagcatggagaaccagaatgtcttccttgtccttcctgagttctgaaagcttttcttattaaaagttctgaattctgattcttgggtgtgagagtaaagcaagatggcagaaagaaggctccactgattgtccctcctgcaaggacaccagatgaacaactattaatatccacatagaaaatacattcataggaaccaaagatcagatgagtactcaaagtacctggttttaacctgagatcactgaaagaggcactgaagagacagaaaaaacagtcctgaaatcaccgtttcctcatccccagcagtgatggcatgctgcagagatcaactctgggttctgcgggagggagacacagcaattgtgaggcactgcacccagtgctgtcctgttagagctgaaaggaaaaccagaccaagtgcagttaatgcccatctacagagggatcaattaaaccagccccagccagaggagaatcagattccagtggttggaacttcagtgtttggaaacctggcaactaagggctcccgcactctgtgtgtctaagaaaacttgaaaggcagcctaggccatcaggactgcaactcttaggtgaggcctagggctgaaccgggcccagagacagtggacttggtggggagggcatgcaacatactgagacaccagctggggcagccaaaggacttctggcattatcattccactaacaccagattgcacagctcatggctccaaaagggacctcatccttctgcttgaggagaggagggaaaagaatagggagtatttgtctttcatcctggacacaagctcagccacagcaagatagtgcactggtcagaatcctgcaacctcctttccagtctctggctcctagatattcctagacacaccctgggccagaaggaaacctgctgccttgaagaaaaggaccatgtgctggcaggatttattgcctgcaaacttgaaaatctttgggctctgaataaccagcagccatacccaggtactacatcaagggccttggatgactctcatagacttgttagatttaggtgaactcagcacattaccagctctggtggctaaaaggcaaaactccttcttcttgggaaaagtagagggaaaattaaagtggactttgtcttgccccttaggtaccagcaaggccagaggtgggtagagcaccaagcgaacttttggaatccctgattctaggacttgattcttggttggcatttatgaagctccccagggccagtagggatcccattgtcctgaaaacgcaagtcccaggccaggcagcattcatcacaagctgacaagaggctttgggccttaagggaacattggtggtagcctggcagtactcattgtggcctgaggtggtggtggctaccctgcctttaggaaaggaagggaggaataggaaggactatgtcttgtggtttgagtgccagatcagctgcaaggcaatagaatgtcaagtggacttctaaaatttttgactctactccctgacttctgagtggcacttctggacccagccagggactgagggcactcactgccctaaaggaaagaacacaggcctggatggctttgccacctgctaattatagagaccaaaggccttgagtgaacataggcagtcgtcagaaagtgcatgcagcaggacttgagcaagacccggtgctgtgctaacttcaggtctgatccagggcagtcatagtgctggtggccagggatgcttgtgtctttcttctcccagctttaggtggcttagaacagagagaaagactctgtatctttgagagaaaataacggtagagaacaagagtctctggctagtaatccagaaaattctcctggatcttgttgaaggctgtcaaggtggtacttctctgagtctggaagactcagagaaggtacccataaagcagatatggcttagatcacaacacccaagtcttttcaaatatgtgaaaagtcttcccaagaaagacagctacaaataagcccagacaatggagactacaataaatactcaccttttctcttttttaattttattttttaaacctctcatatggtgctgcatgcccaagattttaatgtccagacactgaagaacatctactagcatcaacaccatccaggaaaacatgacctcaccaagcgtactaaataaggcaccagggacaaataatggagaaaaagagatatgtgacctttcagacagataatttaaaatagctgtatttaaaaaaaaattgaaagaactttaagataacaaagtaaagaaattccaaattttatcagctaaactcaacaaagagactgaaatagttacaacaaattaagcagaaattctggagctgaaaaatgcaattggcatgctgaagaatgcattggagccatttaatagcagaatggatcaagcagaagaaatagtgagcttgaagacagactatttgaaaatacatagtcagaagagaaaaagaaaaagaataaaaacaacaaatcatgcctacaggatctagaaaaatagcctcacaaagacagatctaagagttattggttttaaagaagatgtagagaaagaggcaggggtagaaaaatttattcaaagggataatgacaaaaaactttgcaaacctagagaaagatatccatatccaactacaaaaatgttataggacattaagcagatttaacccaaaaaagactacttcaaagcattcaatagatcttccaaaagtcaaagataaagaaaagttctaaaggaagaaagagaaaggaaacaagtaacataccggtgagctccaacacatctggcagcagactttacagtggaaagcctaccggccgggagagagaaacaataaacatttaaagtactaaaggaaaaaaactttcaccttagaatagcatatacagtgaaaatgttcttcaaataaaaagaagaaatactgacttttccagacaaacaaaagctgaagtattttatgaataccatgtctgtcctaaaggaatgctaaagagagtacttcaatcaggaagaaaaggacattaatgagcaataaatgatcacctaaaggtaaaaaaaaatcctcactgctaataggatacaaaacaaaacagaatattgtaacactatagctgtgtggtgtgcaaactactcttattcaaagtaggaatactaaataatatccaatcaaaagtaataactacaacaacatttcaagacatagcacaataaaatataaatagaaacaacaaacagttaaaaagtgaagggatgagcacacctgtcctgagccggccgatgtggtggaagctcggagctcgggagccggggaagccctggagcgtgggcggaagggaggcagcctggagagccagaagcctgggcaagggacggaggcctccggcgccccccagcaacagcagggctgcgccacattggtcctgcgccaggcctggcccccggcgacggcgggacgctcagggaggccggcggaaagcgcagctcggcgactggtggtgtttgggctgagacggggagagcagccaggccacccgcaagcggctgcagggtgcctgatcccagcctcgtggccccgggttggttatgacgccttgaatcaggcgcgcgtagctggaccgggctcttgtctactgccattgtctacggccataccactctgaacacgagagaaacccaagcggcggcccgtggcacgctcggcgccactgctcccgccacagggacaggcgcactccacaacttttagggcccacagcaccaagaggacagggagaagccaacaaaggaatgacgctaggaaacgcacccccaaagccaccaaccaatccaagtaaaaacacgtttcagggttccgctggttttcccgcttgggcggccctgcccccctgttccagcccggcccaggcaccctccaccctaccctggccaaagggtcccctgtataccagagcagagcctccctctccaaggctctgttgctatccctctctagctccctcaccctctccctttctctacttccctctccaccttgcccgctctctctctctctctctctctctctctctcgatcgctgtttctctctctccatccctctgtcccttgctcttcttcaagctgtctgtgtctttgtgtgtctgcgtgtatgcttgtgttcccgcgcgtgcacccgtgtgtgtctgtgtgtttgggagtgggtttgctagtgattgtggtggggcgtgtctggatgtccgtcagtacctttgtcacgggatcaggctgccgactctattgccagcgcgtgggtgtcacagttgccgtgatagtctcacacatgcaggtgtgtggatctcgttcattttcatgtagacaatgagagcgaaagcacagagaaaagaaacgtcaggtgcatcacggcctgaggatggattcctgtttcctgcaaaatgcggagtctcccatatagcctgtttgaaaactggaaaggagagcaccgacacgatgctggtcttccacgctttcttggaagtttctgggtccccacagagctcgggaaacagtcaacatggtcacgctttcggggggcggcagagacttgagtaacaggcacctttgcagagagcaaagaaacgtggaatccagaatcacgctttacttggcctgagcgtgactcctgtgtgaatgggactatccgcctcgcgctctgttgcagggctccacgtggggatatgtcatctgtgaaccatgtggatgaaaaacagacaaccacctgagtctcggctcattgctctctggggaattcgctcattccttcggaaacggaattggtctgaatcgctccgggatgaagtaacccaggctggcgatccggagggccgctgagcgccccgctggccaaaggggctgtgggcccagcacttagcccgcactgggcacccaacattttcccggagtgctgggtcctgttggttctggacgcagaagaccgtttttctctctgccttcctttaaaactgtttcttgctccttttgtccctgggtccatccttccctctgttcttccctccctcccctggttttttcctccctttctccctccctccctctttcccttccagagtctctcagtccatccatcctttcctagctccatccttccgtcccactctgtctccgttcctgtcctcatctctgcctgccttgcctcttgcctagaaagggcagcaccccggtttgcaaggggtctcgggtctttagttacaaggcgctccatggtgctggcaaggaggctggcaggacacgggttggcaagtgattgtgagcgaagaggcagaggaatcaagctgcagaaaggagaactggcctggcttctgccccaacccagtgtttcgcggaccgaggactccgccaacccgactaaagaacgcgcggggaacagggatgagagctccgcctgggctggttagaaaacctaggctgcggcctgcaaacccgcgcatgagcagtagacagtacacctcccggtacctggacgggccctgggatccccgggatactcaggaaagaatgacagccctcatctgtgtggagtcactcgccagacctggaactcaggtatcctaggcaggtcagctggaagggaagatatgcctctccataccgagccagaggttcaccgcgaaagagaggcagccgccctgcccccgccccgtcccgccccgccccaaccccgggtcctaaagctcctccagcaagcccggtgttcttcctggctgaggagtggttcagcggagcgggctcttccacctccttcagctccccaagtgacaccggatctaggaaagtttgtgccttttgctgaaactctggggttgacaggagctcatctaacaggctggaggtgagtgtagacgagcgccctggctcctggaacggttgggaggcgccttgatggctggcatctgtgcttgacgcggaggcctccggggtcgcgagcttcggaagtggaggtgccccgtcttcgggttcccacgccgccctggcgacctggggctccagccccaccgcggactctggtgtgacatgggtggtgcaagcacaccttgcccctgtgactcagcttgagggggcccaagctgtcccactgagcacgcgcccagcaggccgtcgcgctgcgggtcctggtcctcttggcatttgttggggtgcggaggcctccgagtagtctcagggtgggacagtcccacttccggaggagccagggcagggaactcaaattcccgcgtgccagggcaggttgggagagtccttctgcctgcgaggcctggctgggctggagcagggggacggcccttgctccctggctcacgaaagccccctgtgggagagccccaggctcgcagggcatgtggggtgcgggaagcgccgttccccacgccccagtgtgggtgaactcgatagaggagggagcacgctgacacctgccgggggccgcgttgcaaaaaccgcctacgtccgcgggtgccctgccaccctgtcccgggtgcctggcccttcgattctgaaaccagatgtgaatcctggactcaaggaggcccgtctctctggccagttcttccctggtggcgatgaccggaaagcgatccttcccaaaggctcagagaagcagggcggtctgggatcgggtgacggcggtccgctttcgcctgccttcttgcgggccgcgtctcccgggccagggtcgagattccggccggtgctgcctcagctggcgtgacctctcattctgaaaccaaatctggaccctgggctccggaatgccgatggcctgggccagcctttctctggtggcgatgcccgggtatgggttccgctcaaagcaggctcgcagggcctcgctttggctcggggtccaaaggagtctccttcgccgtcctcgtcctcgggcttccgcggggagggtgctgtcagaaggtgtcgggagagccatcgccgggagagcaccggccggaatttcacggacggacacgggcagagagaggccggtgggctcccgtgcacctcagctggcctctgcgctgcaggcaggtccagctcggaggccgttagaaagacctaccacctccaccccgttatgaacatgcatgagctcggggcccaaggtcccggggtagcccgccctccaaagccgaaaaccacagggaccagggccttgtggggtgggtgggtgtagggccagattagaggggaaaaaggggcttcgggggctggctctctgggttctccagtaattctatggaaactggaagccgctctcttgactcccacagttttcaggcagaaaccaccccgaagggtggagtgtggaactgaacttccatgacagtcttgagttttccaggccctctccgtgaaggcggcaatgcctgtgggtgtcgccgttgccctgatagtctcacacacgcaggggtatggatctcgttcattttcatgtagaaaacgagagcgaaactacagagaaaaacgtcccgtgcatcacggcctgaccacagattcctgtttcctgcaacaagggaagtctccactgtggcctgtttggaaactggaaaggagagcgaagacaggatgctgcttttccacgcttcgctggaggtttctgggtccccacagagctcgggaaacaaatagtcaacatggtcacgcttttgggggccggagacatgtgaacaacaggcccccttgcagagggcaaaggagtggccctgaatgtgactcctgtgtggacgggactatccgcctcgcgctctgttgcaggctcaacgtggggctatctcatctgtgaaccatgtggatgaaaaacggacaatcacccgagtctcggctcactgctctctgggnnnnnnnnnnnnnnnnnnnnnnnnnnnnnnnnnnnnnnnnnnnnnnnnnnnnnnnnnnnnnnnnnnnnnnnnnnnnnnnnnnnnnnnnnnnnnnnnnnnnnnnnnnnnnnnnnnnnnnnnnnnnnnnnnnnnnnnnnnnnnnnnnnnnnnnnnnnnnnnnnnnnnnnnnnnnnnnnnnnnnnnnnnnnnnnnnnnnnnnnnnnnnnnnnnnnnnnnnnnnnnnnnnnnnnnnnnnnnnnnnnnnnnnnnnnnnnnnnnnnnnnnnnnnnnnnnnnnnnnnnnnnnnnnnnnnnnnnnnnnnnnnnnnnnnnnnnnnnnnnnnnnnnnnnnnnnnnnnnnnnnnnnnnnnnnnnnnnnnnnnnnnnnnnnnnnnnnnnnnnnnnnnnnnnnnnnnnnnnnnnnnnnnnnnnnnnnnnnnnnnnnnnnnnnnnnnnnnnnnnnnnnnnnnnnnnnnnnnnnnnnnnnnnnnnnnnnnnnnnnnnnnnnnnnnnnnnnnnnnnnnnnnnnnnnnnnnnnnnnnnnnnnnnnnnnnnnnnnnnnnnnnnnnnnnnnnnnnnnnnnnnnnnnnnnnnnnnnnnnnnnnnnnnnnnnnnnnnnnnnnnnnnnnnnnnnnnnnnnnnnnnnnnnnnnnnnnnnnnnnnnnnnnnnnnnnnnnnnnnnnnnnnnnnnnnnnnnnnnnnnnnnnnnnnnnnnnnnnnnnnnnnnnnnnnnnnnnnnnnnnnnnnnnnnnnnnnnnnnnnnnnnnnnnnnnnnnnnnnnnnnnnnnnnnnnnnnnnnnnnnnnnnnnnnnnnnnnnnnnnnnnnnnnnnnnnnnnnnnnnnnnnnnnnnnnnnnnnnnnnnnnnnnnnnnnnnnnnnnnnnnnnnnnnnnnnnnnnnnnnnnnnnnnnnnnnnnnnnnnnnnnnnnnnnnnnnnnnnnnnnnnnnnnnnnnnnnnnnnnnnnnnnnnnnnnnnnnnnnnnnnnnnnnnnnnnnnnnnnnnnnnnnnnnnnnnnnnnnnnnnnnnnnnnnnnnnnnnnnnnnnnnnnnnnnnnnnnnnnnnnnnnnnnnnnnnnnnnnnnnnnnnnnnnnncactttctcctttccaatgtccctctgtccatctgtccttttctcgctccattcctccctttctctctgtttctgttcctctccccatctctatttttcaacattatatgatcccattgtgtgtatctgtgtgttaacatttttagcaataaagttcattttcattaagatatgtatattgttatttagacatgttatttatgtgtgtgcatttgtttaatagacataaatttatttcagtgttattctacagcatagtgtaagcataactcataagcagtgtcaacccaaaaattgtgtgactcgcgttactgtgattattttatactgcagtggtcgagaataaaatctctatatctccaatttatatctgtgtattaccattaaattggccccatttcctgtagtgatagaacattattcccagactatgacaggagctgtggactgtggggaggtcagggttaggatgatgcagaagtgaagttaagacattctctctttcacatctttattaaatacaaattccagatgcaagaaatttaaaattccaaacaatattaatgtttatttcattattacataaaatgaaaattataaagcaaccaaacaagtcattaatacacttagataatgaaagattgtatgatctcagtacaaaatacaagtagaatatatgacaaatataacaaaatatgctgtattgtagtaggtgatgaaatctccatatcctgcaatacagtgcaatcaattgaaatgtatgaaatacaataaagtataaattcaggatgtttaaaatgaaataaaacatgagacagatgaataagtacaatcatttaccatttaatatatcttgacttaaattttatgtagaaatattaaaagtaaacagcttgcatagtaattttactatgcaaactgtaaaaatgtatagacattttcccacagggagtgctattaatggtttgtggatattagtactccatgggttcaggctagaagagtgagagcctacaaccttttctgaattaaaagagaagcaatttcttggtaaagcggctcatgcctgtaaccccagcacattgggaggtggaggctggcggatcacttgagtccaaggccaaccttgccaatgtgacaaaactctactaacaatacaagaaaaaaaaatcagccaggcatggcagtacatgcctgtagtcccagctacttgggaggctgaggcatgagaattgtttgaacccaggaagcagaggttgcagtgagctaagattgtgccactgcactccagcctgagtgacatagcaagactgtctcaaaaaaaaatagagcatataattttatatttacttttctacaatctaaaatatgcaaattcatgattacaatctaatatttttctgattatatagaaatgcacgactgtcaccagacatccaaaaggcatcaaatgtctaacatgaaatataaaatttgtctatagccttagcggtctgcaaaattcagggctcaccattctgagtatagagctcaagtttctttcctatgacttcttcaggttctgtcatttattaacacagtgcatctaaaattgtcactgctggtcatctggaagaatctgagaagaagcaggtccttgttctcattcccagagctgcatctgtgctgaatagggtcagggtgctctcagcttcacctcatctgatccactgacaggctcagttatctcctgcccagggaaggaatgggtttctctatccagggctgaatccccaggaccaggcagtgtggctgggacaagccagctctcagcagggaagacataagctgcctgggtggccatggaatacaaggtctgcacctgggcacacagaggcccccggagcctagtgagcagtgtcagctgctcacaggtcattggagaatggattttctgtgtccacacctgggttaggtcttgataaacagcctccgacatagctcgcacagaggtcaccaagctttttcgaagtgatggtgtttggtctcctagggcccgagacttatgccgcttgctgcgctagtgcaagccctggaacttcccctatggtgggcatcacaggtctcctggatttcactgttgtgcacagcagtggaggatcttgattttttattcaacgtcaagctgcactcctcttctggacagttccctgtaaagaaagcatgtgagagactcaccagagcagtccccacagaccctcatttccagaaccccctgtgcacccaggtgaaccccatttgtctctcccactccttcctgaccatctcagcactggaatgaagtgaagctgaaccccttgtgagtccccagatattctcagagtgctaggatctcaaaaatttacttgtcaataagtaactccctttctgctcaagcctcatataaaagtttcctgattatttgctttttggggcaaaccaaaaacaaaaaaaccaccaccaccagcaacaacaacaaacaccaagattctacctgctctgtattggcagctatccttggaactgatttttcttttcctgcagttttcccgatatgagctggactctggttctgtgaacacaatgagagtttgagagagtgcctcaaactgaacaccctgaaattcctagtccatcctggacacacaggagctgaggttaccaccaaaccccagctctcttctgttctccagtgtccaggatctgtacggccctggctgcgaaggagcttccagtttccttgccaagggagcttgtgttgctgccctgtcccttctcaccttgaaagagtcaaatcttacctgatccagcagtcctgttcccggccttgagcttggtttcctcagaattctccttgtttggattgggctcccatcctgctgcaaaagaaagtttagatgactcacctctccctaggcagagtcccatagtctatctctgatgcatttttgcgaatcagtctttcatgtgaagctcttctgccagtgtcacgagtgaacacatttctcaaagtcccctgagggcactaagccatttcacatccccaaatctcaaaataaaaccctgttaaagacacatagctcagtatccctgattctaaccctccttccagcctccataggagcagcccaaggccttaccttgcctttgtgtgtgcttctcactggaatgggagaaggtggtcttgctttcttttgaatggtttcttctcatctgagcccttttctgaaaaggagatctgttggaaagggggctggtcagtggagcactggatggaggagcactagagatcggggtcttcatttccctttcccatgttgaagctcaagtgaaaggtgcgctctctcacacgtccaaaggcagagtgtgggttattctgctagacctgccttttataggtcccttggctgggcgtggcttactcttattggctgaagagttttctcattcctgccgcttcttagatcctcaatcagaagtttcttgctgtagttctactggggacctagacacagttaatgggagacattttcaggatcttgtcataatgtcaagaaaacaaagaactgggagcacagggaccggaagatcagggaatcatttcatccgatttctgtcccagttcctacctggaagtatttatgatcctgttcacctttcaagatgcacaattaaacatgcctatattgacatatgttatatattttgcacagaaagaaaatttattgtacatagtgttaacattgcatgcatagatataatttcttaaatgcttggaaacaacaaatgtcaaattatggttgattgtattagaaccacacatatatgaagaaataaaaatgcagagaaaaaaataaataccaaatgaaatggcccttcctaccttaaaaatggggaagataattagatcaaatgcaataaaattgaattgattaggttgagctagtgctaacctaatcagcccctgattcctgaggtagcaaaaagtctaggtggaaaaactttccccctttctcacccttcctcagtcatcctgggagcaccattgtgttctgtggaatttattcagcctccctagtaaaaatggacttggtctcaaacaggtaacccaaccgatcacaagaaaaacagcctagattctgaacattcagctcctgtcttcacaccgcagacaccacctgaatcccgtcaaagcccacattatttctcaacatccaccatattccggggcagcctctcaaaattgccgcagtgagacaggacaaggtgtggtggagctccaggttcagaatagctgcctcatcccttcctactgcggcggagtctgtctctgctggtcagaaccctccagctagcctagtctatgtccaagcaagtgtcccctaaaaggaccttcttctctcccccactgctgaggaaagcatgcaggaatgagaatttctatgttagggagtactcagcctccagtcccaaatgacttgattgactgatgaactgattccttgaggaggagaaagacacggggaagagactgtgttgggtgagtctgtgttttcccagctgtgctgcctgtgcaaatagtggaaccaaaaaagaattagtggtagacagacactgcctagtgaaattgtctgaatgtaaatggaacttatcataatatgatattgttatatattatattatattataaaatttatttgacgtctaaataaattttgatatattatgatataatatataaaatttggtcaagtaattttataagaaaattgagttaaattttttaacaatattaacatataaactcaatagaaagctaggaaaattgtctactcttgtgtaaatgacttctttttggataactctgtaaaaggtgtgaagaggggtctgctacttacttgatagtaagtacttgataagacatcgacttccacatctttgctgtttttaaccagtgccctttcaagacatgagaatattttactctaagaaagtattttcatagatatcatattaggaatttcgtccattttagttaataaattattatgacatttagtgattattaataatttatgtcactgttaaagtatactcctacagacaacatattacatatgtgttttgatttgtcctttaatctcaggtaaattttttaaatttttatttattaaattctatatattttagataaaagagaccttgtaactgccatatgatgtactttcttagaaagagaaattctcaggcaaaactcaggcctggttgggcacggtggctcatgcctgtaatcccagcactttgcgaggccaaggcgggtggatcaccttaggtcaggagttcaaggctagcctagccaacataaggaaaccccatctgtactaaaaatacaaaaaaaaaaaaaattaactgaatgtggtggctcatgcctgtaatcccagctagttgggaggcaggaggattgcttgaacctgggaggcagaggttttggtgagccgagatcataccactgcactccagctgggtgacagagcaaaactccgtctcaaaaaaagaaaaaactcaggcttatttttatcaaaatctagattttaaataacatttctaggtgtctcctttcaataaaaatccaaaccaaaacaaacaaaaaatttctaggtaattcccatgaatattaatatctgttaaattgggtacttttatttttaagagagggattgtttatatggatgtgttgatgtgtcaaacacgtacagttaaaattgtacctttttttgacagagcctcactctgtccctctggatggagtgcagtggtgcaatcacagctcactgcagccttgacctcccagactccagtgatcctcccaagtcagcctcccaaattgctgtgactacaagtgtgcaccactatgccaaactaacttttaaaaaattgttggagagatgaggtctcactatcttgccccagtgaggtcttgttgtgttgcctaggctggtctcaaactcctgagctctggcttccaaagtgatgaggttacaaatgtgagccactgtgcccagccaagattagacctttcaatgagtgcacatcttacttcaaaaaaaaaaaaaaaaaggaacttattaaaagataaagtctgagttaaaaatgggttcacattaatgatttttaatttggtacttctagtgttaaaagagggattgtttatatgggtgtgtttatgtgtaaaaagctagttaaggtcaaacctttattttttttttttttgagacagagtctcactctgtcacccaggctgatgtgaggtggcacaatcacaactcactgtagcctcaaactcctagaatcaagggatcctgctatgtcaacatcccaagtagctggaactacaggagtgcaccaccgtgcctgattaatttaaaaaaaattaataaagatgtggtctcactatgctgctcaggctgctctcaaactcctgacctcaaatgatcctcctgccttgtcattacaaagtgatgggattacacaggcttaagccattgtgctcagccaagattttaccttcagtgagcacacattttatatcagaaaaaataataataaataataaagtctgtgtgagaaatgagttgaagtagagataacacaaaattggcatgttattagttgttgttgagcctgggtaacaggcctattgtactgtttcttttattttgtgtatgttttaaattttctgtaataaaacatgtacaataatacaaagttgatatacaatgttagctcttaagatcttagtgactttgggggagcaaaaagagagaaagtggttgccagggcatcagtgaagctggttctatttctaggttacacacgtgtgttcactttgaaataattcattgaactttacatgatttctttgtacacatctttctgcatgaatgttatacatatataaaaatttaaatattacctatttgcacacaattttaacatcatatctcagaagaatagcactgttttgtattgttttaaagtgggacatgtttgctcagggcatcatcagatggatattaatattccaaggtatttacttatgtcctaacacttcggtgaccttctaggtcttcccatgattacatcaatttagtaagtaagatagttttaattttttagggtataggccaagcatggtggctcatgcctacactctcagctctttgggaggccaaggcaggaggatcattcgagtccagtgttttggttttttttggatgcaattattattcagcaaagtcctctccccacagtgaggttcagcaatgcaagggcacctagtgcgtaatatgcatttggtatgagtagaactggattgaatcaggaataaaatgtgtagcagaggtcagttcagcaaggaaaattaggtaatgcaggtaaggtcagaagaccacaacccaggagcaaatctttccatttatttcaggaacccatttgccactagttcaccggaaaaggctgatttaaaccgttcatttcaggaaaccatctgccactagttcactggaaggggctgacttaaagcagcagtttgggggcttggttgttccccatagtcatccagagagctttaaacagctctgtggctcaggtcccactgcagggattctgaattcatttatctattgccttttgagtttaggtaattttaaaagcctccctggtgattctcatgtgcacccagggggaaaaatccctggttcagggtgagaaatgcatttgctgctcatgcattctatgtgtgcagctgtgatttgccccatggccactcctgagtttggggtcttagaaaatacacttgtcctgttaaaaatcaaaaaacaacttcaagacacactcagctgtttggctaaaatgcaacaggagaaaatatcttctcaacagatgtacctggattgcacttgctttcagagtaaaaggtggtttcaagcacaatatagcacttttttcctacaggctttcaaggccttttactatcatacccttatgaatcacaggaataaaaaaaaatcatagttatataactgtcaaatattgtattaggaaaaaaattaagggcatgtcttccgtgcttagttaccctgattaaaatcagttaagacccatctgcccggtgtggtggctcacacctgtaattccagcactttgaaaggcagaggctggaggatcacgagctcaggagttcaagaacagcctgctcaacataacaaaaccccatctctgccaaaaatacaaatattatctgattgtggtagtatgcatgtgtggtcccagctacttgggaggctgaggtgggagaatcgctggagcacagaatgtcaaagctgcagtaagccactgcaccccagccagaatgacagggaaagagaccctgtctcagaagtaaaaataaataaagagacccattctttcagacaccctccttcttctacataaaacacagggcttttgactgaaatgttttaagatgaactgaagattctcccacgatcaggagcagtagataggggttgctcccttcctgttctttgagttgaagcaaggcagaggtctggaaactcaaactggtaaatactcaaactggtaaatatatcaattgctttcttttcatatgatgtattaagctattcttgcattgctatttaaaaaatctgagactgggtaatttataagaaaagagtttgactggctcatggttctgcaggctgtacaggaagcatagcaccagcatctgcttctgggaaggcctggggaagcttacaatcatggtgaaagagaagcaggtatctcacatggtagaagcagaaacaagaaagatgaggaagggatggaccacacttctaaacaaccagatctcgcgagtactcactatcacaaggacggcacagagccatgagggactcacccggtgattcaaccacctcctctccaggccccacctgccacattggggattaaaattcaatatgagatttggaggggacatctaaactacatcacatgaccatcagaaaaacagatgaagaattcatggtttctattgtccaggaacttttcatctagagcaaacggattaacagctgaattcagcatcctgtggtcagaagggaaatggattaatggctgaattcagcatcctgtggttgaaagggaaatggattaatggctgaattcagcatcctgtagtaggaagggagaagggagctgcacagagggccttggctgcatttgctccacttcccttatgctgttccttgggttccaatgtcaccatctgaagggctattaatggacagaagaattattgttattgttgtgattatttctatttctttcactttggtaaaaataagtttttagcttctcatataattgtcctaaaaaaccctaagagttttgcttaagtttcttgttatcatgtgttataaaaattgacagggaagtggctaaaacagattaaaattacacaagctctaagagttaagtctctgttgggcaggcttaggaaagacagaactggaaatactccaccagcatgaacatcagaaatatggggtccactttctgttccagccctgcccagatccaccctcttcaatggcctcatccaggtctgacctcaccctagaatcttctctcacagaactgattaaaggaggccagagattcgggcgggggctcctgctgcctctcctgagctggtgcccacgatttcctaaaatggaaaagcagataaatggaagcaaataattctatatttgggggctataatttctttttcattgaagccagtgcttctagagacaccccacctagcaacttgttttccattcctgcaaattcagtagctgcttcacaaggcacaaaaaggtaaatataaatataaaacatctctctgaacagttcacccttttttctctatccttctcatctgtcaatatagcatttattctgcacattttattttccaggtaaataatttttaaaatggaagaaaaaatagaaatactaggcccttcatttaaatcctgaaaattacagaaaacttagcacccaacccccagggtgctatgaggattaactcacatcatgtaatgtttcctgaacattgctctgtaacagacttctgaacacatagtatgtgctcagtaaacattgtattaactcatgtgtacatgttttccaaatgcagacttactcaaacattgatgccttctctaggctttctaaactgtaaagagccagcagaaaatgacatgtttgaaaatggtgacttgtggtttccactttgggccaaaagtatttgtgttgtggtaacagtgttgggtgtcaggagctctgtgctgtgcctactttctctagctgagtgctactatattggatgtagtggaagaaacatcagcattaagaggagactttttaaagaagccaattcatggaccccttccaaacctgcagaatcacatcactaagagagagcctggaatcagaaataattcataggcacattgaaacttgagagttgggcacggtgactcacgcctgtaatcccatcactttgggaggctgaagtgggcagatcacctgaggtcaggtgttcaagaccagcctgggtaacatggccaaatcatgtctctactaaaacatacaaaaattagccaggtgtggtggctggtgcccatcatcctagctactcaggtggctgagactgcagaatcactcgaacctgggaggtggaggttgccatgggccaagatggtgccactggcccatgcttccagccataatcacatggccagcttaaagaaataccatcacctgtgccctccccagagactctgtctattggtcttggtgggagcaactatgtggttgtaattagaaagtcaaattgtccctctttgatgattatataatatcatatatacaaaaattctgaagaccaccaaaaaaactcttagatttgataaataaatttaataatgtttcagaatgcaaaaatcaatgtacaaaaattggtagcatttttatacactaatgatgatcaagctgagaactgaattaaaaagtcacttccttttacaatagctacaaaaaaaggtaaaatgcttagaaatacaattagtcaaagagatgaacgatccctacaaggaaaactacaaaacactgatgaaagaaattgtacatgacacaaatgagaaaaacatcccatgctcatggattggaagaattatgatcaataaaatgactctactgcccaaagcaatctacatattaaattcaattcctaccaaactgccaatgttattttttataaaattagaaaaaaaacactaaaattcacatggaaccacaaaaagagcctgaatagccaaagcaaatctaagcaaagagaataaagctggagatattacattatctgacttaaaattatgctagaaggctgtagtaaccaaaacagcatggtactgatataaattgacacatagatcaatggtacagaatagagaacctagaaataaagccacatacctacaaacaactgatcttttacaaagtcaacaaaaacatacactggagaaatgacatcctattcaataaattttgctggaaaaattatattgccgtatgcagaagtatggaatgggacccctatgtctcaccatatacaaaaatcaactcaatatgggttaaaagactaaaatgtaagacctgaaactataaaaatgctagaagaaactctaggataaactcttctagacattgacttggaaaaagaatttatgactaagatctcaaaagcagatgtaacaataacaaaaatagacaaaaggaactcaaactataaagctcctgaaaatgagctttttaattaacacagtaaacagaaaacctatggaatgagataaacatttaccagtattgcatgtaacaaagatctaatgtccagaataatcaaggaactgaaacagctcaacaaaaataaaacaagtaacctcattaaaaagcaagcaaagaacatgaacattaaaaaaaaaagacactgatggtcaatggtcaacaagcatgtaaaacatgctcaacgttgtcaatgatcagagaaatgccaattaaaaaccaaaatgaggtacaaacttacaccatgcagaatggctattactaaaaagcagaaaaatgagctatcggcaaggatacagagaaaagagaacacttatacattgtttgtgggaaagtaactttctgcaatctctatggaaaacagtatggagatttcaaaatagactaaaaatagaacttccatttgattcagcattcccactacttggtatctacccaaaggaaaataatttgttacataaagaaaatacccatgctcacatgtttatcacagcactattcacaatagccaatatatgaaatcaatttaaatttatcaatcaataatcgaataaagaaaatgtgctatacaagtataccatggaatgttactcagccatgaagaagaataaagtcatgtcttttgcaacaacataaataaaaccagaggccattattgtaagtgaaaaaactcagaaacagaaaatctaatctgtattttctcacttgcaagtgggatctcaattatgcatacacttggatatagagactggaaagatagacactggagactcagaaagatgggaggttggagagggtttaggaatgagaaaataactaattgggacaataaacaacattcagatgattgtcacaccaaaagcccatacttcatccctatgcaacatgcttctgtaagggagctgcatttgtactctctaacgtattaataaagagattaaaaaaaaaagacctggggcggtggctcaagcctataatcccagcactttgggaggctgaggcaggcggatcacgtggtcaggagttcaagaccagcctggccaatatagtgaaaccccatctctactaaaaatacaaaaattagccgggcatggtggagcacgcctgtagtcccagctactcaggaggctaaggcaggagaatcacctgaacccgggaagcggaggttgtggtgagcagagattttgtcactgcactccagcctggggaatagagggagacttcgtctcaaaaaaaaaaaaaagagagaaaaaaaaactttggcttttatcaagaggacaaactattcagttcagacctcataattttcataaataattagattaggcaaaaaaaattaacaaaaataaataaaaaataatattgtattttaagaatgatatagaaagataatttgatgaattagagtagttagtacttagcacatagaatatgttaggcaagattctaagccacttagacctttatgtacagaatatgtaacagagtaaaataaataacacaaagattcattggcaatgacaaattgacatattttcaatcacattagatgatattaaaaccattaacaaatttactgttttgtttcataataaaaaagaatgttaaataacttcattaaaaagtttgactaattaggcatatagataaatgggcagcattttgaccagaacacagaggatacacattttcaaagaccagacaaaattatttatttattttttgtggggagagaacagttttattatctggggatacactggagtcctctccctgggaggtgggtcttccactggttatccccgccagggctccagggggcgccatgcgattcagtgctgggctccgctgggggccgggccttggagaagacgaactgtgcagggaagcagcagctgtggggtcctcaccgcccgctccgcccggctgcacccggcctcctggtgctcctcaggctcccgccgagtctgcttctctggacggcagcgaaccatcctgcccagaaccttatcctcacagcccagtttgacgcaggtcagccattcctgcttcctcctctcaggctggactttgcacttgggtttttacagtctttcctccggccacttctctgtctgccggagcttaaattccagcctcacaaatgttccagctgggaagggcgtgtccagggcgctgtccacactggtctcctggaaggcccgctgcacgggcaggtgcttgcagattcctccaggaccacctgcaggccccggcgctggccctgtgagctcagcccctcccgcgtcccccgcgcccacccactgggccagcgagatctgcagccctctcaggcttcccctgtcaccccagccctgcgaagcgggtgtgcgccccttagttctccgagcctgccgggagccacctccccccctgccctgcccctggcggggggcatgccctcagaacgctgggcagaggcgaaggaagcgggaaatgtccctttctccacactgaccttgggatgtgctgggtcctctccactccctcccaccctgcccgcgctgttccctggggcccgcagtttcagcaaagttccctgccgcgctgggaagccgtcctgttgctcactctcacccttcctccttttctggcccattatctctccccactgggtctccgacatgaccctatctcctcccggctgtccccggagcccctctctgcttccccagctcagccccctctctgacggcttctccctcccacccccacgtgaatctccgggctctcacggggtgcccctgatccccggggcctaggtcaaccagacaaaattattttaaatgggaattccattgaattcatgaaagtaggaatccatctggtcatattttaaataattttgaaatgataatagcaactatcaatttaaccagaattcagaatacccaccattttaccagaaaaaaaaaaaaaaacctgttataactaaccaactaagtcagtaaattttcaggatacaatattaacatatgaacatcagtggcatttttttacagtaacaacaaaatatctgaaacaggaataaagatagttccatttacaatattatcaaatagaatgaaatgcttaggaatgagttaacaaagtgtgaaagatctgcatactgaaaactataaaatgttgaggaaagaaaatgaaaaatacaaaatgggaaatatattttgtgttcatggattctaaaaattaatattaaaatatccatactacacaaagtggtctacagagttaaatttctatcaaaattttaatgccattttattaaaaatgtagaacaacaattttaaaattagtatggaaccacaaaagacctcaaatagccaaatactgagaagaacaaaaaggctgaaagccttacgcttcctgatttcaaactatattacaaagctgtagtcatcaatatagtattgtacctacataaaaaccaatagaacagaatagaggatccagaaataaactcgcaaatatacagtcgaccagtcccacagaatggagaaaggataaacacatcaaggagtggtgtaagaaaaactagatatgcacagaaaaaagtgaacctttctctcacgtcatcacaaaatgaatttgaaatgaaataaagacttaaacataagaactgaaatcatgaatcctctaaaaaaaaatggggaaaaaccttgacactggtcatggcaatgatgttttggatatgacaccaagaacacagtcaacaaaagcaaaaatgaacaagtggaactatgtcaaagttaaaattttctgcacaataaaggaaacaacaaaatgtaaaggcattataggaaatgggaggaaatatttgtaaaccatatgtaggataatatgttactatccaaaatatatgtcatactaatcaatacaaaaaacccacagcagaattaaaagcaatttcttgattaataattgggcaaaatatataaataacagtttttccaaagatatacaaatggccagcaggtgtataaaaaatgcttgacatcactaattatcagagtaattaaaatcaaaatcacaatgaggtatcaccttatcgtggtgtttggatgcctattatcaaaaagtcaaaagataaaaagtgttagggtgtggaaaaagagaacacttgtgcactgttgctgaggatgtcaattggtgcagctattatgaaaaacggtatggaggttccttaaaatttttaaactagaactaccactaatcccaattaggagtatatagccaaaggacataaaatcaggatcatcaagggtatctgcactcctctgatacagataaataaactgagagatacataatttcagctttaataaaaatgaaactcatccacaacaatattgataaatcttgaagacattatgctcagtgaaataagccgaatacagaaagacaactactgcatgatctcgtttgtatgtaaaatctaaaaaagtaaataaaaatttaaaaagccatggaaacagtagaacggtggttcccatgggctaagaagtggggaaagtagggagatatccatggaaggggcgcaccttcagttacaaggtgagtaactgctggggacctaatgtacagaatagtgactatagttaacaatactctgtacttgaaatttgctacaagagtagatctcaggtgctctcaccacacacacagaaacgtattaactatctgaggggatagataggctaactagcttaactgaggtaatttaaagactactgatatctcaaaacactctattgtacaccctaaaaatatacacttttcaatttgtcaaccatagctcaacgaatggagaaaaaaataagagtaaccagcaggtcatatctagccacagggaaactcaatttaaaacgcgcttggccactgtttccagctcaactcgggaactgccggagcgcttctggcccctggacttcaacgctcctcctgcggcccccgtggctggggaaggtacagtcgttcccaggattccagggggcgcagatccggcagggccatcgccgtccccttgctcttgccgcagccccgttaggctccgcgtttcggggcctcctggccggggaggctgcctgtggctgcccgcgcgcccccgtggctgtggttcagccggcccccgcttcggccccgcgcagcccctccggggccgcagccgtctggggcccgaactcacagcctcgggccggtacccgcagccagcgccttcgctgtggccgctcctccccctcgccgagcccgagctggcccagcggagaaggaggacggagaagctggaacccgaacgctgagctgcgggcggcaggtgcgggaacgggagaagctatggcctcgcacaggacggctgctcagagcgacacgagcaaccgccaggagctccgcacgcagctggaagaactcagtaatgtactccgctgtgggataaatggagataataaaagtctgatgtagaagtactcgcagagaaccatgctccttggtcaatctcagattattatcagacctactctaatgatgttagtcttccaaataaagtgagtgactgaactgtcaaatcagcaagatcaggatattgaaactcttgctttgaattctaacgaccagttataaatagaaaatgatgcttaccctggtactgataggacaccaaatgttaaatgtagacaagagagtcatttgcctcaaattcacaggagccagcatctgcattagcagcacaagatacgtccttagaaggttcatcattagctggaagtttgagagctgcagcagaagcggctttatcacagactggatttagttatgatgaaaatactggactgtattttgaccacagcactggtttctattaagattctgagaatcaaatatattatgatttaatttattactactgtgatgtggaaagtggtagctatcggtttcattctcaagtagttttgccacattatcagacttatagcacaaaacaaaaataaaaaaattgagaaaagaaaggatccagattcatctacaaaaaaaaaaaaaaagaggaaaaggatttgaattcagaggatcaagaagccttcagtgttgaacatacaagctgcaatgggaaagacaatttcacaaatctgaaaaaaaaaagccaaaataatcattcatcacaaaaataatcccccaaaattcactgttccagttagtggaaatactatggaatctcctcctaatgaaaacatctcaattcatctttaaggatgagaaaatgacagagactgatagtgaaacagaagaaggcgaaattacagactctcagaccgagggtagttatgatgaaggtattaccagtaaaggcaatgcaactgcaaaagatactgaggaggaagatgaggaaaaagtgtggccctcatatatgagagtaattgtcattacatcacctgtgttacagacaggatcattctgcatcattactgctgtaaaatctgctacaattggaagagaaaatgacatggagcatactcttctaatccctgaagttggtgtaagtttcatgaagaaatttattttgaccatgacttacaaagttatgtccttttggatcaggcagtcaaaatggaacaattgttaatgtaaaatggatggttcagctgaaaactaaatgtgacccttatgaacctgagcatggagataaagtgaaaattggagacactgtgttatcttattacattcaccctggcagtaatagctgtgttggatgtgaaccagggcaggttagagctcaccttttccttgataaaaaagatgaatcatttgttggtccatcattaactaagaaggaaactagttggaaagaagaaaaggattttaaaaatatatgagtaaaatatggtttacagaatacagactacatagatgataagatactggagaatcaaaaatgtaaagatagagctggaaaacatagggagcagattggaagtgaaggaaatttccaaagagatgatgctcctgcatctgttcattctgaaattactgatggcgacaaaggtcagaagatgttgaaaaagatgtgttgaaaacaggagaaggcctggggaaggatggtggaagaatgaaaactccaatacagcttcagcttcggcaaatacatgcaggatcgcagacagacaaaccatcctcaattaaagagactcaccttctccaaaacaagaacaacaacaacaagaacaacaactgggacaaagcacaggagaggtttgctgaaaactttccagaaactaaacttcaaaaagatgacctaggaaccattccttgggtaaaagggactgaggagtgaaggttaatcacaaaagaaaactcaagcttttttataaatagagtttggaaactcttattgcagaatgtctctcccccaaaaagtcagtggcacaagaaagctgtgtcatggtttaccccttcctgattcagaaatgtgtaataaaatgtggtttgcagcttttaaaaaacactttttaaactaattattagtgactgaattaatttatacagtaagtgaactaaagttcacagggcacagataagtttatcaaactttactattttatcttgtcatttacaacatccatataagcaattagccatataagcaaaattcttataaccacttaaatgctcatttgtccttgtctccatatattcatagtagtatgcacagaaaatacagcaaaagaaacatctaaattctacaaaaataaatctgacaatatacattcttgtttatgcccttcaggacctagataaaaaatattgagacaacatgaatagtgatgcgtatattttcttatatttggaatagtctaaatcatattaaagaactaatgaacaggtgacatgtcacagaaaatttgtcttttattgttttcttcggtgaagaatctgaatttgttgatatatactatacattcagcatttgtatttggtttgtttcatagctaatgaaatgtttgtacatgaacaaatgagtacagtattgaaatagttcatgtgctggcattcatactttttataaataccattgcaggcaatgaagttgtgccagaaaaatctgatttcgagtgcaaaaggaatatttagccagggcctcaagctcagtatatttattgaaaatgtcctaaattgccataaaactttataatgttaaattattcatttcaataaattatgaattaaacaaaaaatacaaatgatgtattttatggatcagagaagtgctaatgagacagaatggccattgaagccgaaaggtctgaattcaggtagataattttactcatattagttttatgttagagaaaacaatgcttctgaccatatactatttattgcagtggagtatttcaaaaatatgtacataatatataattaattttctaatggtataaaagtaatcacattctacaaattattacaatatggtctattgatgagaggggtgtttcaaatgaaaaacttggaatttctcatgatgatagatgccatagaaaatctatgtaaaatatttcactcatgtatgcaactatggatatttctgcttttcagaaaaataatatactttaaaaacctaatgcagacaattaaaatcaccaagaagttacaagaattcacagaatgtgtaatatagttgaaaggaaattaagaaaacttcccaggactggaagtaaataaaggtaatgatcccgagaagtaatcaacctaagaagccagggctccactcagatgcgtctgattacaagaatgtcaggtccatgtgggttgttcccttctgacaaggcaaatggaataaacaaagagaaactgcctgcaggcattggaatgtggtgtctcccatatgtgaggattaaattataaattatgttgcacacaaggagatgagctactggggtgaagcatcagaagaaattatatggcacataaatctcagatattgaatttatatttaaatgtttaagtcaatataatggagaaacaagaaaccaaaataatgtggaaagaaactacgagcttgtcaagctatctttggaaaagaggcaaatgaaaagtaaagtattgaaagtgttgtaaaacaatttaatgtacaacatacaaatgacatattaaaataggctgagccaaaaacagggctagtaaagtgaaatgctgatcacaattaatgtagtcgtatatattatagaaggcaaattaatagaaaatataaatgtatttatatatgaagattagattgagaagaaataaaaagcatttaattgttttaccagactctctaaataggaaggcaacagtcaaagaatcagtgactcataagtttcagaaattggaaaccagacactaatcctttaaaagtttagggtgtaatatatgaaaaaaaggtaaattaagaaatacttagaagaaataatggtttgggttattgtgaatactgcttaataaacatgagaatgcagttatcttttttgacatgcttattttgtttccttttgatataaacccagcaatgagattgctggatcatatggtagttctatttataatttattgaaaaacctccatactgttctccctagagaaatgggaatgattgtactaatttacattcctaccaacagtgtataagtgcccatctacagaataaataaagaaaatgttatacacacacacgcacacacacacacacgcacacacacacaggaataatgttcagttgtaaaacagaatgaagttttgtcatttgtgtcaacatggatgagcctagaggacattatgttaagtggaataagccaggcacagaaagaaaaagaccatgtgctctcactcacgtgaaatctgaagaagtccatctcatagaagtagacagtaggatggtggttaccagaggttagagatggcagaaggatgagggagtggggagagctttgtcaccgggttacaaagttacagttaggaagaataaatcctggtgttctattacacagcacgatgactatagccaataataatgtacgtttattctataatagcttgaagcgaggattttgaactttattagcagaaggaaataaatgtttaaagtgttaaatatgctaattactctggttggatcactgtacagtgtatatgggtacaatgtgatgcagtgaaacatcatataattaatataattttacatgtttgtggagtacagtgtgatgcatcacactgtaccatgtagtatgatgcagtgaaacatcatgtaattaacacatgatagttatatgtgtttacggagtacaatgttatgtttcactgcatctcactctaccgtatagtataatgcagaggaacatcataattaacatatgataattatacatgtttacagagtacactgtgatgtttcactgcatcacactgtaccatgtagtatgatgcagtgaaacatcacactgtaccccataaatattactggttcagcagggaactgtgggacatagagcagctctgggttagccatgaccagcagcttcacctgtatggggtagcgagaggggaagggccctgtgctcggctgagagttgacccctgaccacatccactttgactgctaggtgccagcagagctcagggacgcctaacttcaggcagaggcaggaagcaaggtcattacctggttttttttgtttttttttttgttgttttttttgagagagtctcactctatcgcccaggctggagtgcagtggtgcgatctcggctcactgcaacgtacatagaggtgtacatcagaatcacacctgcaggaaggtccctggatgagattaacaatcccacatagaggtgtacatgagaatctcgcctgcaggaaggtccctgggtgagattaacaatcccacataaatgccggttctgggtatgagagtcaaggcctcctgtatgttgcatgtatgtacataagtcacaatctcaatggtggaatggatttttccatgagagccttaatgccttttgaaaattgagttatcttagtggagtcacagcctcacaagtgttttggatcttggtcagggagtcacaaacccacttgtggacaacatccacttatgagagccaaatttccaacttttgactgtctctgggtgtgagattcagaacctcaattatgggctgtgtccatgtgggagaatgataatttttactgatggctgggctcaggcaggagcctttcatcctgcaggctttgagataaatgatacatcacagtacccaaaatatgctgggtgcaggcaaaagaggagagtcatattagctggttgctaggtccagtcatatgtcaccacctctgtttttggcagggctaaggcagaagaggagagtcagagctaaagaaatgtcacaatgttcctgtgggtagggcctatgcataagaattgcaccacctagtcattgaacccagccatatattacaatacacaatgtatacagggcccaggcaagaaaggagagtatatcacataggtactgggtccagcaatgtgtcacaataccacctgaggggaggctccaggcaacagggtaacattacctaagtgaagtgcccagagagatgtttcaatgcccctggtgggtaggattttgaaaaaggagaagttacataacctaggggccaggcctagctgtgtgtcacactcatctccaagatggagcccagacatgagagaaaagtcacatcatgtaggtactgtgcaaagtaatatgtcacaatccttatgtgagcaggccctaggaagaagtagagagtcacatagtctagatgatgggcccagaggtatttgacaatgactgctgtaggtagggaccaggcagaataatcacttcacctgtgtgccgtgcccagttataagtcacacttccctctgtgggcatgaccgaggcagggagaagagtcacatcatcctggtgctttgcccaaagatatgtcacaatctctcctgtgggcaatgctcaggtgagagaggagagtcacatcaaataggtagtggacacagaagtatgtcacaaggccttctgtgaacttgatccaggcagaagattcacatcaacttggtgctaagcccagcaacatgtcacaatcccttctgtgtgaagggaccagaaaggaaaagagaatcacattacctggccagtgagcacagagatctgtcacagtgccccttgtaggcagggcccaggcagaggagttacatcaactgggtagcggacccagcaatataccacagtgtcccatatgggcacaagctggagagtcacataacctgggtgccaggccaagctatatagaacaacgcttcctgtgggcagcgccaagacagaagagaagactcacatcgcctgggtgcaaggtctagcgatatgtcaaaatgctcactgtgggcagtgccaaggaaggagaatagagttacaccctcaaggtgctggatccagcaatatgttaatattccatctgtgggctgggtccatgcaagagcgtcaagtcactcaggtgctaggcactgggaaatttcatcatgaaacctgcagaatggtccgggaatgagattaacaatcccacaactgtcacagttgtaggcatgacattcaacacctcttgtatgttgggtctaagcccacgagtaaccatctcaacaacagactggatttgtacatgacagcctcaattcctctgcagactgaagtcacagcctcacagttatgttgaatcttggtctgagagtcaccaacccatgagtatccatatataagtcaatttttcccacctttgactgactacaggtgtgagattcagaacctcaacagtgacctgtgttcctgtgagaggatgagaatatttactgttggctgggtgtgcatatgagtgccacaatctcacctgtgtgctcggcccagttagcaatctctgtgtactacccaatggcgctatacagtatgaatgagagttgcaatcaactttgagaccttcctgctggtagggacccgtaatcgtacctgtggcattaagcccgggtatgagagtcaacgtcattacaattaactaggtcaggataggagactcctcccttatctataagctgggcttagaaatgacccaccatttcaactctggttgaatatttatacgtgaacacgggcctagcaccaaggtgatgtgagtctttggcctagcaggaggcaacgtgacatatctctctgcctaacaactatttgatgtgaactgctttttcacctgagcttttcccgtaaaagagacgtgacatatgtctagacccagcacctaggtgatgtggctctccttttttgactaagccctgtgtattttgggtattctgacatatccctggacctaacatctggaagataagaagatccagtatgggccctgtctaaaaagtttcatgtgacatatttctatgttaatcaccttggagatgtgactctcctctcttacctgggctttgcccataagagagattgttacgtacctctgcaggaaacacctaaatgctgtgactcttctttcttgcctgggtcatgcccacagatgaaagggtggcttattgctgtgtccagcacaccggttatgtgattattctgcctgatctctgctcacaggagccattgtgacatatccctgggcccagaaactatttaatatgactctcctctattactttaactttgtgcataggataaattgtgatgtatctctgggtccagcacctaggtgatgtgactgcttttctgcatggactatgcccacaggaaggaggctgatttattgctgtgttgagagctgatgtgatacctcggtccttgtcttcttagtttataacaatttaaacaaaagacacacagaaaagaagtacagcataatttattggaaaagaaaacaaaatttttgaaagttaagtgcataatacagtacaccgtgagagagatattctagggcgggctgctcataagagtgagacagcgtggattgtcgctggcgaaacccccttatgggagttttacattattattaataaggaggggggaagaggagctgctagtaagcctgttctgagtggtcttctgggtgcacatgtgcagtagctgtacatgcttattcatattttgcatgtctcattagcatcttagacctctagccaggagtgtatttttgtttgtttgcttgagacagagtcttgctctgttgcccaggctggagtgtggtggtgcaatctctgctcactgcaacctctgcctcccgagttcaagccattctcgtgcctcagactcctgagtagctgggattacaggcatgcaccaccatacctggctaatttttgtatttttagttgagatggggtttcactatgttggccagtctagtcttgagcttctggtttcaagcaatccattcttctcagcctcccaaagtgctgggagtacaagtgtgagccactgtgcccatctggggggtgtattttttgctattaaaataagcaaaagttaagtttgaggacaggtaaaatcaaaatgcacatgctctctagaacagaaagtccttaatgaagatagctttgcttgaatgagcccaattacaatgcgaatgctaaggctcattgtgttggctgtacagtcaccacagtttcattgaaggggtggcctacccctccacacctgtgggtgtttctcatcaggtggaatgagagactgagaaaagaaagagacacagagacaaagtatagagaaagaaaagaccagcgcccagcatacagaggacccatgccggcactggtctctgagttccctcagtatttattgatcactatttctaccatcttggagagggggatgtggcaggacactagggtaatagtggggagagggtcagcaggaaaacatgtgaacaaatgtctctgtgtcataaacaaggttagaaaaggtgctgtgccttgatgtgcatgtatacaaacatctccgtgcattaaaaagagtattgccaccagcatgtctcaactccagccctaaggcggtttcctcctgtctcagtaaatagaacatacaatcgggttttacgctgagacattccattgcctaaggatgagcaggagacagatgccttcctcttatctcaactgcaaataggccttcctcttttgctaatcctcctcagcacagacagtttatgggtgtccggctgggggatggtcaagtctttaccttcccaggaggccatatttcagactatcacatggggagaaaccttggataatacctggctttcctagacagaggtccctgtggccttccacagtgtattgtgtccctgggtacttgagattaaagagtggtgatgaaatttaacaagcatactgccttcaagcacttttttaacaaagcacgttctgcatagccctaaatccattaaaccttgagtcaacacagcacaagtctctgtgagcacagggttggggctagggttacagattaacagcatctcaaggcagaagaatttttcttagtacagagcaaaatggagtctcttatgtctacttctttctacagagacacagtaacagtctgatctctctttcttttccccacatttctgtaacccgagatcatggtcattttcttgactatctattctgatctattctgcctcagtttccccctaagagatcttagagtcataatcatattggacattgaggggctaggtcactttttctggagctgtttcctgatgagtgggtgatatttctgcctagtctgggccctaaagtttcttcctgtgtgatctaaccgggtgtaaaccatgtaattgtggaaccagtgggcaagttgttgacagccaaatgttgaaagccttgcaaaacaatcatgcaaacatggagttgctataagcaagagagcaaggaatcagttaacattttaaacaaaattggaacaaaagtaaaagctaaaagtatagtaatgactgttactattaaagaaagtaaggcaggtaatagacattgctttcatgttcccatggaagttcctagagattcaattttgtctgcctgggtgatgatattattaatattttcttggactaaaccgggctgattgatctcaaaaacagaattgttcttttagatataaacattttcctctttgcccggctgggagaagatcccaggctctttgcttttgtcgatctacagtggccatggagtccagacgttgttgaagtctattgaggccctctgctgcttgttgcggacccattgaggttttctgagatagtttatactggattcccaaggctccaccttacggtgacatttatgctgcaaaagtattttgcattaaaatggtgagagcaacaaatgttttaagtattttctatttttttgctaataagcaaaattttgtgcagctgagttggcagcagtcattgggtccatttatggatggtgaagttgaatggtggtcaaagttagagcctggaagccttcagtaaatgcgctgaagttgtctgagggccataagagttgttgcttatattggattagatcatttattgagagtagaacaagcactctgatggtcctctctccatttgggactttctgtaaggggagcaatttctctggccctggatggtgtgaagtcccactgtgagtaactgcagctgggctggtctctattgtacctggcaaaggccaatagagaggagcataaggaggaggtgaaacaagcttagattctacagaagactctgatagtgtggggatgctggggattctaaaggaggtgtaggcccctgagggcccctgtctggagctggtgttgggctgtggggtctggggtcccttccccttaataagagatgatcttccaattgttctgaggggctttctggcttactaggctttagcctacaggtgctgcatagagctggattttgttgtcaggccagaaaggcttgcacataggatacttaagaccattttccctgattattacagaaaagatctagctgtaggatggagttaaagttcacagtctcattctccagccatgttttgtcagctaatctgtaggcaggcaaaatagtgttacaaaagaagataaggttttcttttttctaagttcatttagccaaaagctgttctaatttttagatatacatcccagggatgtttcagtgacagtagaggaagcggctcccacggtgccgagagaatcctgcaacgacagaacatttactgaagtccaggaggctgtgggcatccccatgagccaagtggaaccaccaaggtgtccagcgcatccccttgaaaccccattaactgaagctctaggaggtcataggcatttgccatacaccatcctatctacccccagcggtggacatctccagccctaccgagatgacccccactgcgggctggggggcagatgtctggctaacaagccttgccctaattcactggtttgtcatttgtgatgcccaattacaacatctggaatgctcagatgcaatccctacgactaggcatctgcatgactgtgcatcttttgttcagcaaagaaagcctgctggagaacaatttcaaggaggtgggaaatgcataaagcctgaagggacagggttctcttaatgtgctgctcaaaacaaaacaaacatttttgtaaacagaaaacctgaccagaaaaatacattacaatgaccactaggtggcgatggagtattgctgaagggacagcaaacaataagcggagtctgaactgtggccagaaagatgtgaaactaagcggcaaagcagcccaaatatgaaatattgagggcaacacatgtggttagtgtatttatcgataccacagaagcagcagccaaaaggagagcggacatatattctctctctaaagaatatagttgacttaaaaacgtttccccaagaactttactgaaatagcactggaacaagcagcgatagttaaccagggagtctggaactgccatagtattcactgcaagaaaagggaaactgaaattaatgaagcagacaaaactctccccaggtcatggtaccagaaatgttgatggctgatgtaataccttgtttcttatcttcttagtttaagagacacacagcaaaagaagtacagcataatttattgcaaaaaaagagaatattttgaaaattaagtgcagaatagacggtacggtctgagaaagagattccagggcagcctgctcataaaagtgagacagagctaattattgctggagaaaccctctttatgggagttttgcatgattattcataagaaggtggaaagaagtgttgcagaaagcatgttctgactggtcttctgggtgcacagtgcagtagctgtacacatttgtgcatacattgcatgtctcagtagcatcttaaatctccacccaggaatgtgttttttactgttaaaataaacaaagggtcaggttgaagacagataaaatcaaaatgcaaatgctttttataagtaaaagtccctactgatgatagcgggtttcaaatgaccccaagtgctccacatcttaaaagttgctcccataaagctggaacactatctgttcctgaggtatcaggtcccatatgtggctccgagtcactggcaagccaggcctgacttgagatgagaccattaatttcaagtgtaaaatgcctaaatagtcagcaacttcaggttgcattttggagcatgtccacttaaatgggttgatgaaaatggctcacaagactcacgcctcggagtcttagcagattttgtgcgacccaataattaaccttctgatgactagactttcacagttgtgaaaaaggcgactttgagagtgacatttccaggaagccacagcccttgtcaccccctgcagagctctgaagctgctcacaagcaggccaggtgaaagatttctctcaaaaacggttaagtgcatgctctggctagagaaaaatgagggttgcggcacaatcgactgtgtctcagacatcaggaaagtttccacagcagtttaggaaagaaggcagcgcctagggctgcagaagacgtaatgctctggaaagaaccctgggtgcaattgaaagaggaacctgagaaggataggctcaatcgggtgaggacaaaccggccatttgggaaaagggaaggtgtcttcgtagggtaataccctcctcaatgcccagcccagacctgccctccaggtgcacctgtgtactcactctccttgcaaagagttggcatagcataagaactcaggagtgctttggactctgggaagtccacaccgctctaaccctccctccagggctatgcaccccggatcctggtacatgctgggagtatagttctgaagcctaccgacaaacaggctgagagcagttaacggactacagctcccagcatattaggtggggcgcgtaccactctgccccttcttccagttctgcgcctcgccctggagcctggcgcatgctgggattgtagtcctgtagccctttgaccaaagggttgggagtgtttatgagaatacatcttccagcaatcctagggaggcgcacacagcccggtctcttcctccagtgacacgcattgtccctgagactagtgcatgctaagattgtagtcctgcagctctttgaggaaagggctggaagagtttatgagcatatatctcccagcaaacctagggagacgcacacagccccgcctctttttccagtgacgcgcactgtccctgaccccggtgaatactgggatggtagtcctgtagccacgggaccggaaagtctgggagtctttatgaaactacatctcccagcaagtagaaggaggcacccacagtccagtctcttccaccagtaatgggcactgtccccgagctgtgtgcatgctgggactgtagtcttgcagcccggtgatgaaagggctgggagtgtttatgagactacatctcccagcaagcccaccgaggggcgcatggccttgcctcttcctccagggacgcgcactttccctgagtccggtgcatgctaggattgtagtgctgcagccctgtgaccaaaggactgggagcgtttatgagactgcatctcccagcaagaccagcaagaagtgcggagcctcgtcccttcctccagatattagcgcactctccctgagcctggtgcatgctgagattgcagtgttgcagccctgtgaccaaagagctttgttatagttatctgtgaagtattcaacaaattactttacttaattattactggaagccagaacctcagttgcgttcactttttggatattatatgagtgaaattgtataatatgtatacttttacatcgactttcttctatgcaacattatagttatggtattaattcatgatattgcagatagctatagtttgtttatttaatttttttttttttttactttgtggtaaagtgtacatcaaattaaccattttagctattgtaagtttgcagctcagaaaaattaactacattcacattgttttgcaactatcattcccattcatacggaccttctttcaacttgcagaaacaaaactctatacccattaaataagctccttgttactcccctcaggcttctaggaaccactcttctacttgggtttctagaatttctttactctaagtatctcataattggaatgattcagtatttgttcttttatgactggctcgtgtcactttgctcaatgtccttaaggttcatgcatgacataccatgtgtcagaatttccttattttacatagctgaataatattccactgtatgtataaatcacattttatctatttattcattgatggtaattcaaacaacacttgagtaattcaaacagctttctggtgatgtgagtaatgctgctgtgaacctaggtgtatgtgtattattttctgtctttgctttcctatcttttgctacatacccagatgtgaaattgctggatcgtatggtgacattacatgtaaattttttagttactatgttgttattttatagcagctgtagcattttacatttccaccaacagtgtacaagggttctaattgctccacatcctcaccaacacttgtgattttctgttttgttttctttcttttggtagtagctatgctgatgggtattaagcgatatgtcatttggggttagatttgcatttcactaatgatgagttttgttgagcatcttttcatgtgcttattagccactttacaaaatttttagagaaatgtctgcttaggattttgccaatattttaaacaggtagtttgtgttattgttgctgaattgttctttgcgtattctggatagattccgattcatctatttttcttttgtttcttgtgttttgggtgtcctgttaaaaaaaaaaaaaaaacactgccaaatccagtgtatgacatgtttcccctatattttgttctaagaattttgtagttttagctcttacatttaggtatttgatccagttagttaattttttcttatggtataagtgaatggcccaggttcattctttttacatgtgggtaccgaatttccccagccctgttctgcctctgaccgtcggtcctgtgtgggtttacttggaggtgctttgccttggagaaaggcgggtggacggtggtgggggcaatacagccctgataacaccttgacttaagcccagtaagacacgtgagcaacaggcccccttgcagagggcaaagcaacgtggaatccgaaaccaagcttcagtcggcctgagtgtgactcctgtgtggacgggactatcggcctcgcgctcctttgcaggctcaacctggggctatctcatctgtgaaccatgtggatgaaaaatggacaaccacccgagtttcggctcattgctctctgggcaattctctcattccctgggagacgaaattcgtctgaatcgctcccggatgaagcaacccaggctggttatccggagggccggtgagcgccccgcagaccaacgcggctgtgggccgagcacttagcccgcactgggcacccaacatttttccggagtgcgaggtcctgctggtcctggaggcagaagaccgcttttctctctgccttcttttctctgtcccttgctccctccctnnnnnnnnnnnnnnnnnnnnnnnnnnnnnnnnnnnnnnnnnnnnntcccttcctccctccctccttccctctcttcctccctctatccctccatcccttccaaggtccctccgtccatccgttctttcctccctccatcgctccctccctctctgtctccgttcctctccccatctctgcctgagttccctcccgcgtagaaagggcagcaccccggtttgcgcggggtctcgggtctgcatttagctgtcaggcgctccacggtgatagcgaggaagctggcggggcacgggtaggcgagtgacggtggcggggggaggcagaggtagccagacgaggaaagaagagcaggcctggtggctgcccgggccagtgtttcccgggatggaggtctccgcccactctactgaagaacgcgagtgggtgggggggaaagggatgagagctccgcctgcaaacccgcgcatgagcagtagacggttcacctcccggtacctggacgggctctgggatccccgggatgctcaggaaagaatgacagccctccactgtgtggggtctctcacgggacctggaactcagggatcctaggcaggtcagctggaagggaagacacgcctctccataccgagtcagaagttcaccgcgaaagagaggccgccgccccaaccccgcgtcctaaagctcctccagcagagcccggtgttcttcctggctgaagagtggttccagcagagtgggctcttccacgtccttcagctcccccagtggcgccggatctaggaaaggttgtgccttttgctgaaactctagggtcgacaggagctcatctaataggctgggggtgagtgcagaggagcgccttgcctcctggagcggttgggaggctcctgaatggcttccatctgtgcttgacacggaggcctccggggtcacgagcttcggagttggaggtgcccagtctttggtttcccatgcagccctggcgacctggggctctagtcccaccgcagactccggtgggacgtgggtggcgcaagcacaccttggccctgtgactcagcttgagggggcccaagctgtcccactgagcacgcgcccagcaggccgtcgtgctgtgggtcctggtcctcctggcatttgttggggtgcagaggccaccgaggagtctgagtgtgggacaaccccacttctggaggagccagggcagcgaacacaaaatcctcgcatgccggggcaggttgggagattccttctgcctgtgcagcctggctgggctggcacggcctggctggggcagggcctggctcggccagggccaggctgggccaggccttgctgcctggctcacgaaagccccctgtgggagagccccaggcacacagagtgtgtggggtgcaggaagccccgttccccatgccccggtgtgggtgaactcgattgagggaggaggttgacacccgccaggggtgttaattagtaaccacagtggcctcaaagagctcaaatgaaaggaagaactgcacgtctcttagtttaagtcaagagctagaaaggattaagcttagtgaagatgtaaaattttcatcactagagagacgtcaacgcttggcttcaaaacttcaaaggatgggctgactctctttgaggaccactgcaattggtgactttaagttacagccaatgctcatttgaccactctgaaaatctcagggcccttaagaattatgcaagtctattctttctgttccctagaaatggaacatcacagtctgagtgacaacacatctgttaacagcatggtttactgaatattttaatcccactattgagacctactgctcagaagaaaaaaaaaaaaaaacgattcctttaaagagattgctgcttggccaggtgcagtggctcacacctgtaatccctgcactttgggaggccgaggtgggtggatcacgaggccaggaatttgagatcagcctggccaatatggtgaaaccccgtctctactaaaaatacaaaaaaattagcctggcatggtggtcgtacctgtaatttcagctacttgggaggctgaggcagaagaatggcttgaaccctggaggcagaggttgcagtgagctgagaccatgccactaccctccagcctgggcaacaagagtgaaactacataaaggaaaaaaaaaaaaaaaggaaagaaaagaaaaaaggaaaaaagattattgcttattgacaattcacctagctacccagaagcttagatggagatgtacttggaaattaatgttattttcatggctgctaatacaatatctgtccttcagcctgtggatcaaggagtggttttggctttcaagtgtttttattaattaataaatgcattttgtaaaggtatagctatcatagatagtgatgtctttgatgaatctggataaactgaattgaaaaccttttggaaaggattcaccattaatcctttcatgatatttgaacctcctcccgtgaatcacaaatgtccttaatagcaatccttaaattacattaaggacatttgtgattgatgggaggaggttgaaatatcaacattaacaggagtttggaagaagttgattccaggcctcatggatgactttgagggcttgggatgtcagtggaggaagtccctacagatgtggtagaaatcgcaatgcaaccagaattagaattagggccttaagatgagattaaattgctctgaattcatgatgaaacttgaacaaatggggagttgcttcttatggacgagcaaagaaaatattttcttgaggtggaatctactccaggtggagacgctatgaacattgttgaaataacaacaaaggatttagaatattccacaaacctagttgataaagcagcagcagggtttgagagggtttactctaattttgaaggaagttctattgtggataaaatgctatcaaacagcatcacatgctacagggaaatcttttgtgaaaggaacaaacttcgttgttttaagaaattgatacaggcatccaaccttcagcagcccccatgctgatcagtcagcagccatcaatatagaggcaagaccctcaccagcaaaaacattatgacttggtaaggctcagatatccattagtatctttcagcaatgaggaattttaagttaaagtatgtacatagctttttagaagtaatgcggttacaaattaattaattaattaataattaattattaaatactcattagactacaacatagtttaagcataacttttataagcactgggaaacaaaatgtttatgtgactaacttgattgtaacatttgccttattgcggttgtctggaaccaaacccacactatctctgagtatgcttgtaggtttttgtttgttccttgttttgagatggggtttcgctctgtcgcccaggacagagtgcagtggcatgatcatagctcactgcagcctctaactgctgggtcaagtgatttttctaccacagcctcctgagtagctgggacaacaggcatgcaacactatgcctggctattttttttttttttttttttttttttgagatggagtctcgctctttcccccaggctggagtgcagtggcgcgatctccgctcactgcaagccccgcctcccgggttcacgccattctcctgcctcagcctcccaagcagctgggactacaggcacccgccaccacaccgtataattttttgtatttttagtggaaacggggtttcactgtgttagccaggatggtctcgatctcctgacctcgtgatccgcccacctcggcctcccaaagtgctgggattacaggcgtgagccaccgcgcccggcctctgccattatcttctattaactttgtagtttgaccttttgcttttaggtcttaaagccatttggtgttaagcaccattgttatacgtacttgagtaatgggaaaactgaggcacacagaaggtgagtaatttgaagactatacagttcaacaagtgacagagctagtattcaaaccgaggcagcctggcccctgaaactgtgttccgtagctactgtgtcatgctgcttctccattgaccaggatcggtgattcagaagttgctgtgtgcagagcctttaaatgccaatctttcactctgtcctcccaacagccctgagcagtaaggcctgttattaccagattaaagaaactgaggttcccaaaagataagtggcaaaaccagatctttcagactccaccctttgtgtttttggacactaaactatagtctcccctgaaataaccaggaatcacgcnnnnnnnnnnnnnnnnnnnnacactacacacactgcacacacagcaccatacacacacaaaacgcacacatcacatacaccacacacactgcacacacacatatcacaagcacaccataccacacatagtacccgtacacgccacacacatacaccacaaacacaacacatacacacaccatacaccacccacagtattcacacgacacccacagtacacaccacacacacatatacgtaccccatgcacttactacacacacagaccacacacacacaccatacatatacatcacacacatacgtcttcgcacacctcacagagtacatacaatactcacttttagaacttaattcaggttttaaggagcctggataataaactattttattggcgtttgaatgagctaagaaaatgcatataaatacacatgcttaactataattgcacaagaagcactttcgaaatcacaacattagattaaaccatctaagttttttattgttattgaaaaatcaagtcttcatcattttactaggaactatttacagaataaactaatgagattcttcctgaggtaaaaagactttttggaaaaacttctccttgatgaaatttcacttaaaacatcacttccatcgtgaagtatttctttaagatattcttggtcccttccttttatgtggaatcgtcaattcaaattttaaaggagactttgagatgtttttcatctattattttaaaaatgttgaaggggtttttaattctgccttcaacagagatggacacacctctgattatgatgtaaaactgaatacgttactctggcaggctttctcctctgcagcttagctgccatcattattaataaggattgtatgcttttactccatgcacaatctgtattccctgctttataaagaatagaaatctaattctcactatgaaggcagataaaagtaatcacttcaacctacagatgactgaatcatttaccaaagcactcagacttgaaatagcatttatccaatgtgtctatatttctacacagattcatatgaagaacatgtagtttaaatcattgcacaatttatgcttttaatgagttgtgatggtcattaatatttttatcacatttccccaaaggtgggctacttactgttattcttttcagttagaaatatagatgtattttctatttttgatgactttgaaacataatccttggagtataatatctatgtgtaatatctgtggaaagcatgaaaataatattcaaatagtatgcatttttccagaatgaaaatttcctctacaataatattcatcttttttttcctgatgggcacataaaagtcaacatttgtaacattgctggacattatttacattaaacatgcatcagcttcaggtgttgcagaaactgggcaagaggccacaaggtacacaatacacacacatgcacacacacatacacacacacaaaacttgtattattatacttacctaagtgtctaaagaggtggataaatatattagattactctagagcaatgatttttgtggggtctattggaaaatataactgtagtttgagtgagattcctctaagagattcaacttggccactatttattgagtattcaattttaaaaatactaacagaaggcttatgggatgaaaatttccatctaaatctatgggaaatgtgctactagatgctgtagtaaaaagactgatgtggtaattgtaaaatatatctaatatctaaacctttgtttgttttttacctgaaatccttatgggggtgattgtgtatatcaatttgaatcttcccatcaacaagatgcataaataaatagccagcctacctctataaattaataatttagttcacctgctctatattttgagggcagtgcttctcttcctttgacatgcacaaaattcacccggggatcttattaaaatgcaaactcatagaccacgctttgactagctaagataagggatcagagcatcgaaataagtgtgtaggtgactgtgctaagattctactgctcatttgggcactggctcaccatattaacaaagcttaggacctctagtccttgctggaaaagaaatacacatacataggatgtgactgtgcatatggaatatctgttgtgttctggacattgtgctagacaacagagataagaagtcaaataatctcttgtctctatctgaaaggagcttcatacacagtggcttctggatgtctctgaaactgggttcactttcagatttgattattatatttatgatttgacactggcattgaaccccatgatgtgataaatttttccagaacctgccagaacaactggctttgctctcaacatcaggaagccactggggcacataaataattcatttatgtttgtatttcaccagacaggaacaacttgagctaattttctagccacatttgtttagagctgtttttgtttgtttttgtttgtttgtttgtttttgagacagggtctcactctgtcacctaggctggaatgcagtggtgtgatcagagctcattgcagcctctaccttctgggctcaagcaatcctctcacctcagcctcctgagaagctggaaccacaggcttataccaccatacccagctaattaaaaaaaatttttttgtagagacagggtttttccatgtttcctagacttgtctcccactcctgagctcgagcaatctgcttgcctcaacctcctaaagcgtagagctgtgtttttagtcttttttgaactgttttacaatccagtgttgaattgataagtttggattcactctgatatttgcagatttaacatcctacttcacaagatgctcatagccttgatccattacagccgctgcctcatccatctctgctcatatccttgatccaatacagcagccaccccgtccatctctgctcataacctaaactaatagaagccagagggaagaaatggaagccaacgtgagtccagaacacacattttataagagcataagaaatttaaaaatagcaaagtatataatgaagtttgtaatagatattcatggctaaaatttattcttatattaatcaatatattctataaattgggagaaaatattaaacacatgaaaagtaaggaactttcatcattaatatataattaatatgacaagaatgtggtttatgtttttatctttacaagatttaggaacatttggtgcaaggaggaagaatgtataatcatggggagcatgtatgatactggagggagccttttgacaagggggaaatggcatcacgagatatgctatgatcatagctatgtaggaacacagctacctatggtctccccgtcaaatccactgggcagtgttcagttaccaacattgaggtagagctcactctcccagatcagaagagaaaatatacactgcagtcagaagccactgagtaggaagctcctttcagatagaggcaagggatatttgactttttatctctagtgtctagtacaatgtccagaacacaacagatattccatatgcacagtcacatcctatgtgtctgtatttcttttccagcagggactggaagtcctatgttttgttaatatggtgagccagtgcccacatgaacagtagcatcttagcactgtcaccagggcatccatttaaatgctcttatcttagctagtcaaagtgtggtctatgagtttgcattttaataagatccccgggtgaatcttgtgcatgttacagaggaagcactgtcctacatcccatgtgacaggctctcatagtcaccatcatcacgggaatcttgcccatgttacagggaagtgctgtcctacatcatatgtgacaggctctcatagtcaccatcatcaagggaatcttgcacacgttacagggaagcactgtcctacatcgtatgtgacaggctctcatagaaaccaccaccctgggaatctgcatttagagcatttaactatatgggctctgaaatcaggtgacttaggtttagacttccttctactttttactaagcagagaactctggggtgaaaactttacgatgccattttatcacatccaaattggaggcacggggagattataacattttccatggaatattgttttacatataaaatgaaatagtacataggaagcttctgccatgcactaactgcacaataaatattagttaatagtaactcatttagtcctaaggtctataaatttgtacactataattttttgtgactacccaaatttttataattaatgtagatttaaaatcaaggaatgtttttatgtgtagttggtaatcaatatgacacgccaaaattatatgtaagtagtttatttttggtggggatataagaaatttgccatcaaaagagggaaaataatctatgttttcagactccagaaagctgtgactcacctaagagtttgcaatttctgtctgggggaaaagaagagaaagttgactgtgaaaataagcattaccatagagccttctctatggcaacatcaaaaatgaaagctgattctcatcttcctaacaatctgcaaagacaagtgaaacacaacctactgagcatcaagttaaagaaggagtgaatttgagtagcacgggaggaaaccatgtcttcgccactagggaaataaatatgaccactgttcctctgccctcctccgaggctaaagatgggttaaatatgagtgcctgacctcagataatggaatgagcaaaaaagctataaaatgcatgcattacataattaagagggtgggaagggattttttttaaaaaggcaattcctagttgggttccttcctgttcacgccattgatgaagaaattagtcttgccctagaattctggggatggctgcagacacaacaaacactgagcagatgaaattcacggtaatttattcatcgcgcatactcagcccaacaggggatgacactgcatctatgcaggtctacccgggggttcactctggagcacagggtgcgggaggcaggcttggtagaaatcagagggtggggtaacccttggtcccttgagggatgtgcttgactaattcaaagagtttagcagtctgttgggggcatgaaagccattaggctgaggacctggtgggatgcagcatgaaattttaggtgtcacagtaaaattgaccctgatgctttaaaatcagacatttattttaatgatgactaatattttgagaggctgagagaaggctgttgagacattgtaataagtgcttaggggcatgagacattaggaaggccacaattatgagtaatgaaatgtggaagctgatgagaagctactgctcccatttgcttagcaggaagcaggaaaagtgatctgggatctctggcagcacaagcgtgttggtaaatatttgggtgatgtcatgcatcccccatgcattggttttcatgtctccagtgagttgttgggcaagtctgatattactgatccacacgcagcaggcagcttcctgtatggagctacctccaccccttggacagttcaggactgaaaggttgtcaaaaatgtgaactccttgatgtccagtaaaggcaactgaggggactgtctagcattggtgtaaaaagtgcactttcctaaggagcatgaacttagagtaatcaaatcctgtggcaacagtggtatccagcagggcatccactcgattctttgtaccttaaataggaattctttgaggagctcagtgtatctctcaactgaagcagctgcctgcatcctacaggggcagtggaagctctgctggacaccttcttcacaagcccagcactgtgttttctgatgaaatgttgctttggtgatcatcagtagtgtctggaactctgcaagggataaggagtgtccctgtgagagctgtactgtgtcctgagttaaaataaaggcatctgttaccttgtttggtattctgagtatccatgagacaagaagtttatttaattcaatggggagggaaggtggacaattcttggcaattgtcaaaaagtttgtaaaaaggtacaagtggggctaattgttggcccagcatcagtgctatgatgaccacctcaagtttggccagttgtgctgaggcttgggtgtcatcctttatcagggacatcctagctaagggagggaaagcagcagcatcccactgagctccatcacgtccgatcatggcatccattcagaaggtggacgaacttcactgctggtctctcagtcgatcccaagggcctcgcagaggggtgacatccagcaccacagtctgaggatgaaggaggccagtgtcagcattatagcctaaggatgaaggaggccagtgcttcctgcagatgagaattgcagggggtacagatttgactccattcggaggcaaggaggtctctgcagctgtgccaaagctgtggggtgctgcttcccaaggcctgatggccagatgggcatgaaggctcatggacatggatgcagagccctctctttcaagggtccagtatgtggccagcaatcactgccctgatgctgtacagcacagggtcaaaagaggcaggtttgttttttacatcagaagcccatggactacttatggccaccacatgcaaaccagatacttcaggaggcatgggaagaggctgctaaagcatctacagtgtgttctctgatgaaattcataggagcgcctgttaatttaaattcggatggattccagacttgttggaggaggcttcattcaaggtgggtcagctttcaagtgacagcatcagcgagattaagtaaaatttgtaattaagaaatatgtagtcacctgaaccccaagtaaagaattaaagggctgggcacagggactcacacctgtaatcccagaactttgggaggccgaggccagaggatcgcttgagcccaggagttcgagaccagcctgggtaacatagcgagagcttttctctacaaaaaaataaacaaaattagctgagtgtcatggcacacacctgtagtcctagctacttggaaagctgaaatgggagaattgcttgaggtcaggaggtcgaggctgcagtgagctcagatcatgccacttcataccagcctgggtgacagagcaagactgtgtctccaaaaaacaaaacacaaattaaagaatgttgggcttgtattaacattgtggatgctgagaggatgaataactatttcttgaaagtgtcaggaatagagcagccccaagtttaccaaggaattttcaggaattgaagcaaagtggcagggccttgcactgctgtgttggggaaaggtccattccctttgtataaggctctttgtgtctgtgtgtccttagtgtataaaatgaattttctctgagaatgatgtcatcagtataatgtcacacctgtactcctgtagaaaggtggctgcagtgagatattgtctgtgaagattgcatgcaatgatgaggctgccaaggcactccgtgtgttacctggtcccttcagagaggaaggaatgctatgattgagactctgttaaaataggcacaaaaagaacatgttagccaaatctataacaacaaaatatttaccagttgcatgaatatatataggtttattataaggaattggctcatgtggttatggaagctaacaagtcccagggactgcagtcagcaagctggagacccaggactgccaatggtggagttccagtccaagcctaaattcctgagaaccaggaaagctgatggcataagttacagtccacgtctgacttcaaaggcaagagaagatctacgtctcagctctgaaagcatcaaagagagtgaattatctcttcctctacccttgtgttttatttgggctttaatggattggatgaggcccactcacactggggacggcaactactttactaagtctacatattcaaatgttcatctcatcaaggaacaccctcacagacacatccagggtgtttaaccaaatatctaggcaacccaacttggcaaataaaattaaccatcataaggtgaaagatgtatacgatctgaagagaaacgagggatgcaggacggttaaacatctgcaagtcaataaatgtgatgtgccatataaacagaattaaaaacaaaaataacaagatcatctcaatacatgcagaaaaaggatttgacaaaatccagcatccctttatgcctaaaaccctcagcaaaatcgacatagaaaaagcatttgacaaaatccagaatccctttatgattaaaaccctcagcaaaatcaacatagaagggacataccttaaggtaataaaagctatatatgacaaacacacagccaacattacactgaatggggaaaagttgaaagcattccccctgagaattggaacaagacaatgatgcccactttcaccacttctattcaacacagtactagaagtccttgccagagcaatcagataagagaaataaagggcatccaaatcagtaaagaggaagccgaactgtcactctttgctgatgacatgatcgtatacctagaaagccctaaagactcatcccaaaagctactagaactggtaaatgaatttagcaaagtttcaggatacaaaattaatgtacccaagtcagtggctctgctatactgtaacagtgaacaagctgggaatcaaatcaaaaactcaccaccttttacaatagctgcaataaaaacctgaggaatattatgattatatatatatgattataattataatataattataatagtatattcctatagttgtcaattgcatgcaatctttgcatacaaaatcttaataatatccggaatacttaaccaaagagacaaagacctctacaaggaaaactacaaaacactgctgatagaaatcatagatacaaacaaatggaaacatatctcatgctcacggatgggtaaaatcaatattgtgaaaataccatactgccaaaagctatctacaaactcaatgcaatccccattaaagtaccaacatcagtcttcacagaactacaaaaattcacatggaactaaaaaagacatagaaggaacataccttaaggtaataaaagcctagaaccaaaaaagaatctgtatagccaaaacaagactaagcaaaaagaacaaatctagaagccgacttcaaactatactagaaggccatagtcaccaaaacagcatggtactggtataaaaatagacatatagatcaatggaacataatagagaacccagaaataaagccaaatacttacagtcatctaatcttcaacaaagcaaacaaaaacataaagcagagaaagaataccctattcaacaaatggtgctgggataaatggcaagccacacatagaataatgaaagtggatgctcatttctcacctttttcaaaaatcaactcaagatggatcagggacttaaatctaatatctaaaactataaaaattctagaagacgacattggaaaaacccttctagacattggcttaggcaaagacttcatgaccaataacccaaaaagcaaatgcaactaaaacaaagataaatagatgagacttaattaaactaaaaggtttctgcacagcaaaagaaataatcagcagagtaaacagataacctaaagagtgggagaaaatctttgcaatctgtacttctgattaaaggactaatggccagaatctgcaaggaactcaaacaaaccagcaagaaaaaaaaatcccatcaaaaagtgggctaaggacatgaacagacaattctcaaaagaagatacacaactggccaacaaacacatgaaaaaaatgctcaacataactaattatcaaggaaatgcaaatcaaaaccacagcacaatatgataaccccttcactcctgcaagaatggacataatcaaaaaatcaaaaactaatagatgttggcatggatgtgttaaaaagggaacacttttacactttttggagggaatgccagctagtacaacagctatggaaaacagtgagcagatttccaaagaactaaaagcagatctatcatttgatccagtaattccactcctgggtatctactcagaggaaaataagtcattatatgaaaaagatacttgcacacgcatgtttatagcagcacaatatgcaattgcaagaatttgaaaccagcctaaatgcccatcaatcagtaagtggataaagaaaatgtgatataaatatttaccatggaatactactcagccataagatggaatgaagtaatgcattcacagcaacgtggatgaaactggacaccattattctaagtgaagtaactttggaatggaaaaccaaacattgtatgttctcattcagacatgggagctaagctatgaggatgcaaaggcataagaatgatacaatggtcttcggggactcagggaaaggctggcagtggtgaggtgggtgcggtgagggataaaacactacacattgtgtatagtgtactctgcttgggagatgggtgcaccacaaatctcagaaatcgccactaaagaacttattcatgtaaccaaacaccacctgttccccaaaaacctattgaaataaaaaaaacccatcatattccccaaaaacctattgaaataaaaaaaaaattaaccacaataatatttagcattgggtacgagggccttaatggatgggaacgctgcagtcacattacagcaatccactgtgaaacaccatttattctttgcaggtttaagaacaggccaaattctactgctaaatgttgaagcaatgaggataatcaccccttcactaattaattaggtcttatataataagttttatttatttgaagtcatgttgtaatttctattggaccatatttgctaatttatcaagatggggaggctaggcaccatggctcacacctgtaatcccagcactttgggaggccaagacaggaggattgcttgaggccagaatttagagaccagcctaggcaacgtagcaagactgcacttctataaattttttttaattggctgtgttggtgcatgcctgtaatcccagctacttggaaggctaaaatgggaggattgcttaagtccaggagttcgaggctgcagtgagctatgattgtgccaccacacttcgttcagcctgggtaatggagcaagaccccatctctaaaaaaatgaaaaattaaaaataaatcaaatttaaaaaaaaacaggagagggagttctgtaaggttacatttgtgaagtcaatgtgtaagtgcaaatggtttaatttcaatttgttactcattaggtcagagcatccatgtcccctatggacaaagtcttctatgactacaggaaatttagtcaaggtaaaaaatatgaggcataactatgtgtcctctattctatatgcagttactctgctaggattagggggtgcaaagtttaaatttagtgaaatctcaggtataacaaagtttgagctccagtattgattacgtttgtgaaggtataccaattggtagatttcagcagatgttaaattgattcagaatatatgctggagagttacaaataccagtcagcacccttttatctttggactatataaattgttttagaagatagtacatttccagttaggtcagatgatagacttccgttttaatttaaattttgtttttgtgcatatccaagttccttcccttcctttcttccttccttctttccttccctccttccttccctcctctttccttccttccttccttctttccttccttccctctctccttccttccctctctccttccttccttccctccctccctccttccctctctccttacttcctcctttccttcattccttcctgccctccttccctctctccttccttcattcctcccttccttctctccttccttccttccatccctacctccctccctacttccttccttccttccctctctccttccttccctccttccttccttccttccctctccctcatttttttgtcactggatatggggaaggttgttctctttcccactcatatttataatttttttatttgaaacagccccaaatcagtatcttcagagttaaggtcctgcttgtgagcagattgtgtggtttaagaaccctagacttaggtttggatttctcccttctctgcctcaggggtaccgcaggtgtcttttcctataaccctgggaattagatctttgttgcggcagaaccatcagtgcgatgcagcacaaccagcccacaattcaggggtcagtggattgaaatcatcttctgctacggctccatctggttcttctaggacttccctccatcttttttattgcttttagggtgttgaaactttagtggcatatacattgcctcataatcagtcaaaactccacttatcccacgtcatggattaaagagaacattgccaggagcccttcactcttctagaaggactttatttgataggtcctttttccatggtttagaataaaagaggtaataactagaaatgtctccctcataataggctctacagcaaattctattttaaaggctgttgttcgtgtcttcaactatggctgtctttaatgtttttgtcatccacagacagttgttgtctcattttggtcctctttaaataatggttttataatcagctataaaatctaacagatgaccttaaatgcaggattctgcttaataacgctggagattgtgacattagaatagaaggaaaactttcaaatagaagagtgaatggtgtttggtctactttggaccgtatttttataaatatgttattagtatgtattccaaaattattggaaacttatatagaaatgtaatccccagtgttggaaatggggcctgctgggaggtggctggtccatgggagcagcttccagtggttcccactgtaggagatggggcctgctgggaggtggctggtccatgggagcagtttctaatggttaagcatcatccccctagcgctgttcttgtgatagagttctcatgagatcttgttgctaaagtgtgtaggaccttccccctctctctcttcctcctgatcttgctttcccttccaccatgattgttaagtttcctgaggcctccccagaagctgagcagatgtcagcatcatgcttgctgtacaggctgtggaagtgtgagccaattttcagtgctcttctgttttctttttattttatttttttaaattttattttaagttccaggatacatgtgcaggacatgcaggtttgttacatgggtaaacgtgcactatgatgatttgctgtacttatcaacccaccgcctaggtattaagccccacatgcgttagctatttatcctgatgctctccctccctgtccccaacgacaggccccagtgtgtgttgttcccctccctgtgtccctgtgttctcattattcagctcccacttatgagtgagaatatgcggtgtttggtcttctgttcctgtattagtttgctgaagatgatggcttccagattcattcatatccctgcaaaagacatgatctcattcctttttattgctgcatagtattccatggtgtgtatgtaccacattttctttatccagtgtatcactgacgggcatttggattgagtccatgtttttgctattatgaatagtgctgctataaacatacgcatgcatatatctttataatagaatgatttacagtcctttggatatatactcagtaatgggatttctgggtcatatggtcgttctggttctagatccttgcagaatcgccaaactgtcttccacaatgatggaactaattcacattcctgccaacagtgtaaaagtgtttatttctccacagctttgccagcatctgttgtttcttgacttttttttttattatactttaagttttagggtacatgtgcacaacgtgcaggtttgttacatatgtatacaagtgcaatgttggtgtgctgcacccattaactcgtcatttagcattaggtatatctcctaatgctatccctctcacgtccccccacccgacaacagtccccagtgtgtaatgttccccttcctgtgtacaagtgttctcattgttcaattcccacctctaagggagaacatgcggtgtttggttttttatccttgtgatagtttgctgagaatgatggtttccagcttcacccatgtccctacaaaggatatgaactcttcattttttatggctgcatagtattccatggtgtatatgtgccacattttcttaatccagtctatcattgttggatatttgggttggttccaagtcttcgctattgtaaatagtgctgcaataaacatacgtgtgcttgtgtctttatcacagcaagatttataatcctttgggtatatacccagtaatgggatggctgggtcaaatggtatttctagttctagatcccagaatcaccacacagacttccacaatggttgaactagtttacagtcccaccaacagtgtaaaagttttcctatttctccacatcttccccagcacctgttgtttcctgactttttaatgatcaccattctaactgatgtgagatgatatctcattgtggttttgatttgcatttctctgatggccagtgatgatgagcattttctcatgtgttttttggctgcataaatgttttcttttgagaagtgtctgttcatatcctttgcccactttttgatggggttgtttgtttttttcttgtaaatttgtttgagttcattgtagattctggatattagccctttgtcagatgagtaggttgagaaaatttcctcccattttgtaggttgcctattcactctgatggtagttacttttgctgtgcagaagctctttagtttaattagatcccatttgtcaattttggcttttgttgccattggttttggtgttttcgacatgaagtccttgcccatgcctatgtcctgaatggtaatgcctaggttttcttctagggtttttatggtattaggtgaaacgtttaagtctttaatccatcatgaattaatttttgtataaggtgtaaggaagggatccagtttcagctttctacacatggctagccagttttcccagcaccatttattaaatagggaatctttccccattgcttgtttttctcaggttttataagatcagatagttgtagatacgtggcattatttctgagggctctgttctgttccattggtctatatctctgttttggtaccagtatcatgctgtttttgttactgtagccttgtagtatagtttgaagccaggtagcgtgatgcctccagctttgttcttttggcttaggattgatttggtgatgcgggctcttttttggttccatatgaactttaaagtagtttttccaattctgtgtggaaagtcattggtagcttgatggggatggcattgaatcaataaattaattgggcagtatgggcattttcatgatattgattcttcctacccatgagcatggaatgttcctccatttgtttgtatcctcttttgtttcactgagcagtggtttgtagttctccttgaagaggtccttcacgtcccttttaagttggattcctagttattttattctctttgaagcagttgtgaatgggatttcactcatgatttggctctctgtttgtctgttattggtgtataagaatgcttgtgatttttgcatattgattttgtatcctgatactttgctgaagttgcttatcagcttaaggagattttggctgagacaatggggttttctagatatacaatcatgtcttctgcaaacagggacaatttgacttcctcttttcctaattgaatagactttatttccttcacctgcctaattgccctggccagaacttccaataatatgttgaataggagtggtgagagagggcatccctgtcttgtgccagttttcaaagggaatgcttccagtttttgcccattcagtatgatattggctgtggttttgtcatagatagctcttattattttgagatacatcccatcaatacctaatttattgagagtttttagcatgaagggttgttgaattttgtcaaaggccttttctgcatctattgagataatcatgtggtttttgtgtttggttctgtttatatgctggatcacatatattaatttgtgtatattgaaccagccttgcatcccagggatgaatcccacttgatcatggtggataagctttttgatgtgctgctggattcagtttgccagtattttattgaatatttttgcatcaatgttcatcaaggatattggtctaaaattgtcttttttttgttgggtctctgccaggctttggtatcaagatgattctggcctcataaaatgagttagggaggattccctctttttctattgattggaatagtttcagaatgaatggtaccagttcctccttgtaactctggtagaattcggctgtgaatccatctggtcctagactctttttggttggtaagctattgattattgccacaatttcagagcctgttattggtctattcagagattcaacttcttcctggtttagtcttgggagagtgtatgtgtcgaggaatgtatccatttcttctagattttctagtttatttgcatagaggtgtgtgtagtattctctgatggtagtttgtatttctattggatcggtggtgatatcccctttatcattttttattgcatctatttgatttttctctcttttcttctttattagtcttgctagcagtgtatccattttgttgatcctttcaaaaaaccagctcctgaattcattaattttttgaagggttttttgtgtctctatttccttcagttctgctctgattttagttatttcttgccttctgctagcttttgaatgtgtttgctcttgcttttctaattcttttaattgtgatgttaaggtgtcaattttggatctttcctgctttctcttgtgggcatttagtgctataaatttccctctacacactgctttgaatgtgtcctagagattctggtatgttgtgtctttgttctcattggtttcaaagaacatctttatttctgccttcattttgttatatacccagtagtcattcaggagcacgttgttcagtttccatgtagttgagcagttttgagtgagtttcttaatcctgaggtctagtttgattacactgtggtctgagagacagtttgttataatttctgttcttttacatttgctgaggagagctttacttccaaatatgtggtcaattttggaataggtgtggtgtggtgctgaaaaaaatgtatattctgttgatttggggtggagagttctgtagatgtctattaggtccgcttggtgcagagctgagttcaattcctgggtatccttgttaactttcagtcttgttgatctgtctaatgttgacagtgcggtgttaaattctccccttattattgtgtgggtatctaagtctctttgtaggtcactcaggacttgccgtatgaatctgggtgctcctctattgggtccatatatatttaggatagttggctcttcttgttgaattgatccctttaacattatgtaacggccgtctttgtgtcttttgatctttcttggtttaaagtcttttttatcagagactaagattgcaacccctgactttttttgttttccatttgcttggtagatcttccttcatccttttattttgagcgtatgtctgtctctgcacctgagatgggtttcctgaatatagcacactgatgggtcttgactctttatccaatttgccattctgtgtcttttaatttgagcatttagtctatttatattcaaagttaatatagttatgtgtgaatttggtcctgtcattatgatgttagctgattatttgctcgttagttgattcagtttcttcctagccttgacggtctttacattttggcataattttgcagcggctggtaccggttgttcctttccatgtttagtgcttccttcaggagctcttttagggcaggcctggtggtgataaaatctctcagcattttcttgtcagtaaggtattttatttctccttcacgtatgaagcttagtttggctggaaatgaaattctgagttgaaaattcttttctttaagaacgttgaatattggcccccactcttttctggcttgtagagtttctgccgagagatccgctgttagtctgatgggcttccctttgagggtaacccgacatttctctctgtctgccctgaacattttttcctgcatttcaactttggtgattctgacaattatgtgtcttggagttactcttctcgaggcattctttgtggcgttctttgtggcattctctgtatttcctgaatctgaatgttggcctgccttgctagattggggaagttctcctggataatatcctgcagagtgttttccaacttggttccattctcctcgtcactgtcaggtacaccaatcagacgtagatttgttcttttcacatagttccatatttcttgtaggcttttttcgtttctttttcttcttttttctctaaacttcccttctcacttcatttcattcatttcatcttccatcactgataccctttcttccagttgatcacatcagctcctgagtcctgcattcttcacatagttctcgtgtcttggctttcagctccatcaactcctttaagcacgtctctgtattggttattctagttacacattcgtctaaatgtttttcaaagtttttaacttttttgccttcggtttgaatttcctcctgtagctcagagtagtttgatcttctgaagccttcttctctcgactcatcaaagtcattctgtgtccagctttgttccattgctggtgaggaactgcattcctttggagtaggagtggtgctctgctttttagagtttccagtttttctgctctgttttttccccatctttgtggttttatctacttttggtctttgatgatggtgacgtacagatggggttttggtgtggatgtcctttctgtttgttagttttccttctaaacatcaggaccctcagctgcaggtctgttcgagtttgctggaggtccacttcagaccctgtttgcctgggtatcagcagtggaggctgcagaacagcggatattggtgtactgcaaatgctgctgcctgatcattcctgcggaagtttgtctcagaggagtacccagccgtgtgaggtgtcagtccgcccctactggggggtgcctcccagtttggctattcaggagtcagggacccacttaaggaggcagtctgcccattctcagacatcaagctgcatgctgggagaaccactactctcttcatatctgtgggacagggacatttaagtctgcagaggttatagctgtcttttgcttgtctgtgccctgcccccataggtggagcctacagagtcaggccggcctccttgagctgtggtgggctcctcccagttcgagcttcccactttgtttacctactcaagcctgaacaatggagggcgcccctcccccagcctcactgtcaccttgcagtttgatctcagactgatgtgctagcaatgagcgaggctccgtgggcgtaggaccctctgggccaggtgcgggatgtaatctcctggtgtgtcgtttgtgaagcccattggaaaagtgcagtattagggtgggagtgacccgattttccaggtgccttctgttacgcctttctttgactaggaaagggaattccctgaccccttgcacttcccgggtgagatgatgcctcgcccggctcatgcaccatgcactgcacccactgtcctgcacccactgtccagcactccccagtgagatgagcctggtacctcagttggaaatgcagaaatcatctgtcttctgtgtcactcacgctgggagctgtagactggagctgttcctatttggccatcttggctccacctagtcttctgttttctagattttttagtacacttctgttttctagattaagacattcctatggaaaatttttctctcatttttttttttaagcacataagacatccttaaaaaaatcctgttttttttaaaagattttctacttatctttgtttttttagtgataagtggtttgaaagtgaactgcattcatatagttttcttcacatttcttgtgcttgaggttatttgagattcttaaaactgtgggtttattgttttcatcaattttgtatttttttcctactattatttcttcaattttctggggttttttagcttttgttttgttttgctttgtttattctcctttgggtattccaataacatgtaagttatgctactaaaagttgttctacagctcactgattttttttttaatgtgtactttctttctgtgatttacgctggttggtttctactgtgttcgcagggttggcctggtgtgactctgtggctttcttgagacatttgaatagtaccaaattttatttaaaaattttaaccaacacactatgtttactcatgtttgaaggaaagctcttggctgttcctcttttttctgcctcactcttaccaatgtagatgacagagccttgcagactcatctaagccttgtaagactccataccacgtttaaaaaaatcataactgcttttttggttacatattatagagtcattatttaattctgaatctagctttaattttttgtttaaagcaggaaatattttttgttcccacttaatgctattgagtagggatatttgtgttgatgcttacttgaggactaataattatagttggccatgaagcaaaaatcacatatttctaaattaccctttcaaaagattcattaagttgcctgtaaatcacaatgtagaccaaagtatttatgcagtactttagagactctcaataacgacaaatatccaggtttctctagtagaaaagaacagttgagtaccaaatagtttgcattttatcatctaacgttcttcaaaaataagattttaagcatgataattacactcagagcagtgagatgttcatactctgagaggcatttaggatgtgaaagtgagaaaacaagattttgtgaacatagtcttgggattactcactgtgtgtctttcagccacttcccctctccctctcctttcatcactttcttctccttgattttgagttgatttctgtatatttataatggaatttcccaatgtcatattgtctcaacagcacattatgaaacaagtacttttaaatttacattcaaacacagagaagtagaagttcttctttgaaagtaggggttcttctttgaatgaaccctacattgcctttggggggtggtcattatgtataatttttaaaaattgctaacatctgaagctaaaattcatttttttgtattaagtctaatactttttttaacttaagtgtagatttttttaaatgctccataacggttttatttatacgatttttgtcactgcaatttgattgcttcattcattgctttctttgtaataccatttctttcaaatatcatgctttcattggtttcatgaacagatttatactttagagtgtgagcaaggatgttctgttaaataaatgggaaaattaatcctcccgaatttatattgtcatgtggaagtgaagagtaggtttaattttgtagcatttcatccagctttgtctccatcctttgatacatgaacaaattacatgagtgaagaacaccactgtgttttcttaaataacttttcaacttcagtaagtcatgcaaggatcaaatgtgagagaaatagagaacctcaggatcaactcaagtacttttggaaaaagtactgaaaaatgaggtggggtagtttcaaaactgacctgctcagcattgaaaggatcttgtttcttaaggaagccatggagttttatcagcttaaaaatgagtggtttgtaaaatgaaattttttttcttttaaacttacttttgaaacttccattcttgttcgtggattgtggtttgttagaacagtgattatttagtttttatgagatgtttcttgtatttttatttatttttttttaaggcagagtcttgctctgtcacccaggctggagtacagtggctcaatctcagttcactgcgacatccacctcccaggttcaagcgattctcctgactcagcctcctgagtagctgggattacaggcacctcccaccacacccagctaatttttgtatttttagtagagatgaggcttcaccatgttggccaggcttgtctcaaactcctgacctcaagtgatccacccgcctcagcctcccaaagtgctaggattacaggtgtgagccaccgtgccctgcctgtttcttgtatttgatgatgaaaatctgttattaacaggcaccgggcctgtttcttgtattttatcatgaaaatctattattgacagtaagaggatggaggctcaggttaacaacagggtgttagaaaagcagcagtaaaattttgattctcaaaacatttgatgtcttattcctttttttgaacataggttttgctaaaaaagaccagtcattttgaaacttgattttactgtcatgttctcattttgaaattcatcttattgtttgtacgaattggcagacctatgtgggaaatgtcggttttgcatattttcagattattttcatttttacatcagagattttgaacagatgctatacaaaagtattcatttatttattcaacaaaatttagtgctggttatgttgcaagcacttagtgaacttcatgctgtacgtgcctgagatactttcgtgaatgtaatggcaacatcaaaaactttgcccttgtgcaccttataaacctttaatttcaaggcatgttgatgagtgggcatctgctataacatactttcatggtcatttaattcaccattatttgggtgtaccttatattaaagctgattattaaaaactggaaaatatttaacacatcttcatcttgcctttttccttaacatatgtagatcaagggagtcactgagaatcaattttagggatagttataaaaatcttaactttgcaactataactttgtcctcaatgtaataactggaaaaaataatttacatttcaaaggctttaatctttgtatttttttgaaaaggagccttcaccgagattctttaaaaattcttgctctgtcctatagtagagactgatagactcatggatattgtcctctaatggatctgtaccacctcagttctctgattgtcgccctcccgtagtgaaaattaaagcttattttcatttcatgtctaggatgtagtatgttcttgttgggaaaaaaatgatgtttcttgagaaataagtgccttcagtatcactgtgtgtcacttaataaatacgacaaatatctacttttaccaattgctgcaatttgatccttaaacagccgtctttaaattgtactttttcttcggttaaagaaaagtaattataatagacattaattatttttacataattttattatgtggacagccattcttataactaaaactttcggatgtttatattacaagtacaattattatttattattattaatgtcagtagccaaatgtaatcaactctcttccttttacttccttttttgaatcaaaatattacacttatagaagcaagagcaacggctctatatctggatcactgccgtgcctagaagatacaacagcacaatttacaaatccaaatttccaggaagtctctccacatacctctagtacaaaagatgcttcagagactagagggtcagtggggaaagagagaaaatattcaactcctagttcaggacaaaagggaagaaagccggctgttgaaagaaatccaagaatgactgtcgcaactcgctcctttctgtaaagtattcatggtgttttacttaaaatatttgctcttatgatggtcaataatattaatagttatgctttgtaaaagaatttattctttacttataattaatggatcattctaagttattatatgtttagttgctatagtaagatgatgtgaaagatttgttgcctgttaaatatttctgggatctttgctttatttttatattatgatttgtgcttccaaagttgagctgtaattttattgtttatacaaatgtagaataaagcttaagtttggggagaaaaataaaagctagagttttcctttcagctatagaacagtcatttatttctataaatgcttttttatgtagctttcctagttccacatttaaaaagataaatatggggatctacacaggtctcagtaaataatatttcttgattaataatgcatttagtataaagcttgaagtttaaagtagaattttgctcagcctacatcttttatggtcaggctgctataattatgtaatacccagttaaatttcaatttcagataaacaagcaataatattttagtataaccatgtcccaaatattacatgggatatacttacactaaaaaaagtatttgtttatctgaaatttcaaattaactgggcatgctatattttctgtggcaacctgttttatagagaacagtgtaagtcagctaaattttagaatacttaaccctaacatggtgttctaggtctttccttcttgtaattattattattatttggagtcagggtcgtgctccatcacccaggctggagtgcagtggcacaatcacaatgccctgcagccttgagcttctgggctcaagtgattctggcacctttgcctttgcctcccaagtagctagtaccacaggtacgtgggcccagctaattttattttttttttctcagagacagggtcttagactggtctggaaatcctgggctcaagcaatcctcccacctctgccttcacttcccaaatagctgagaccacaggcacaggccaccaccatacccagcttattttttatcaggttggtgcaagagtaattgcggggtttgccattgaaagtaacggcaaaacctgcaattactttttgtaccaccctaataattttttgtggagacagggtcttgccctgttgtctaggctggtttccaactcctgggctcgagtgaccctcttgccttggcctctaaaagttctgggattacagacaggagccactgcaccaggctactttgtataatttttaacataaacataaatattttgagaaatagatatgttaaaaccattggaggaaaatatattgtaaagtatacaatagaaaaaaaaacaaaatacaacaaatacaacaaaaaattatcaaaattttcagaggaacaaaacaaaatctagttttacaatcttcagaattcaatcccattataacaaatgtataaagaaacatattcaaagaaaaaggcaatcaatagagactgacctcgagatgacccagatgttggaattagtgtggatttttaaagtagttattgtaattcttactaaaatcaaaaccccaaaaacccttaaaataaatggataggaaatcacagcagagaagaagaaactacaataataacaaaggctcaagtggaaattctagaagtgagaacgttttcaaaattaaaaaataataatcagttgtgttcaggagcagcttggaggtggtaaagagtcaatgaaccttaaaatacaattgaaatgattcaatctgaaaaatgtgagcagtcataggttggggtgagggagcttttcctttggttagtgcttttaagtaatcttggttttgataagattactagactgatccgtcagtggcatgctaagccagagtttatcttggtttcagtagtgctttaaacaaaactcctgatatccttgtgtacaagatggaagaagagtggaccagatgacaatatttagatgaagtcattcttaacctccgttgttctcccagtggtctagctgcggtttgtataaagtggaatgggaggaatagggaagcagtccccacctaccctctccccttgtccacttgtcctccttcactagtggataaagtccacgggaacaggcaagttattttaaatctgtatcttctgttgtcaagatctgtaatcagttctgctcgctggactggggacaggaaccaagggaacatgagggtgaacgggttggcatggagtccaggaacacactgtgcctacatgcagaatgtttgtgccaggaaagccagtcggcaggcagatggtctcagataccaagctagtgttgggaagcaagaatcagtctcttgaaggtggtgttcctcattctgtggtttctatcacttgcttcagaatgacctggagtacttattaaaatgcaaattttgagcccaatcctagacctcctaagcctgaatctctacggatgggtctcagtagtcaatattggaaacgtgcaggtccctaggagatgcttatgcatatagatttgaactgttgtgtttaagggttagggagctggcaaaagcaaggaatagaccaagcccttgggtgggaagactccataaccttggcactgttagcattctgggtggaacaggattctgccatatgctttgcagcatccctaacctctactctctaacaccgtattccagttgtgaaaaccaaaaatgtcccctgggaggcaaaatagtcaccagttgggaactggaaccactgctttgtgggatcagagtggttactttgttcccaatccaaggatcagaacacaagatgagagaaagtccagctattggaactggagtgccaagttgaagctagatctacaacaaaagctccaaaagctcctttatagggctgattccatgcctcagctacctagcttgtacagatgccatgtaactctagatttggtgacagaaggaatttaaaggctagaactagatagggtctttcaggttaggccagcacacaacgtggacttttgacatcatccagatgcttaaaccaatctcactcctgaggcagaatttcccgtggcatctgatacacagcctggctttggagcactcactgggattagatgccatgggaatattgtgtttaggaactctgaaagagacaggcttcaacaaagcagacctaagcaacacgtagcgtctgaacttctttatcagcttccattccaggccaggaggacaaaagcatcacatacatatccactgtggcaaatctgtcctcagtagggagtttcctcagtactactctcccctctgttctgagcctacttgctcctttgtaatgtttccactttctgatccactccctaatagatgatttgtcttctctgcccagccccctagttctaatatttggattgtctgtgatctgggtagtacttaggaggtagaatcaaagccttgttgattggattgggagtttctaacttcctattaaaggcactgattaagcatctattgtataaagtaaagtaagattatgatccagtaagaaagtttccacaagtagcgcaggaagaattggtttctagtgcacttcatgcttcaggacaggaaacccagaaaataattctgtggtacgttaagtgtgtactgtaagtttcatttccatgtgaaaaactgtagttagctaaaaagtacatccatgaagaatcctgattaaacttgtttaatcctggttaaactagctactagctaaacaataatttcacaacaactcaagaactctgtaaaagcatttcctccgaatattttattcagaaaaaaacacaaaaagataaggcagaaacaaaaatcccagtcatttgctgtatctgttggctttcaatttggccctcttgtttaaacaaagaaaaatagtaaaattaatctatgtaaaacataccatatatattcaactgctactaaatataaaaagctttaaaactgtgtgttcaattttggttactgtattaccacaacacttatattaaaatatgtatacttttaaatttggttgctataaaaaatggattctaatcctataaaagttatttcctaatattcaataaatgttgcctaagggctttttcaatccaaatagcaattttaattattccggaatttaagggtgctctaaatttccatttaacagggtgagaatgctgtattattacaagtgagaaaagttacaggacatggagcttattccgttttagagtccatatcctgattatattttatatcctcttcttgatttcttacaactagatacatattcatttgctcagctggaaaaaatttgtaacatttactgactttacgtatgaactctaccagctagttaacaggaaatatgtaattaaacattgcctttatcaagtaatgtaaaaaaagggtaagagtaactttgcaacataggacttgaatgagcgactggtgatgatcaaaatctggcacttaattgatttatacttgtacactcacagctaaacgtctctacctgtttttctatggtgtaaatctaggacattacttatctacataggaagagtaataaatattaataatgtgctatgataaacatcctgcactcttccaaatcttacaataaaactgcttcaatttcacttgtttagcttttatatttagtttgttagttgatatatgcttattttaaagaacctgaactactctaacagaatccacataatttttatattagccaaactgcttctttctaactctggttctaatagttataaaaagataatgataaatttatgaagtagatacagtcaaacctgaatttcttaaagtatatacttagaattggttataatttttagatattctttgttgatggtcttttcccaaactcatgatgtcctctctaggtaatattgccacactcataaattataaataaagacaaaaatgtgaaaactacagtaatttaagagaatataggttttctacatgccatttctattggctactgaaaatagtgaaaataagtaaataaatagctacctgtccagaagcgtctcatgcaaaaatccatctttctgagcttttttaagaattttactgtcttctttacttattttaagtttgtggtcttggaagctctgaaatttctttctgcaaagaaaatgtcttcattgaaaaatacctcaaactctgattatacatatttactattaaatttataaatactgttaatttctttttcacttattaaaaaagtctaattgtaggccaggtgcagtggctcacacctgtcatcccagcactttgggaggccaaggcaggcagatcactcgaggtcaggagttcgagaacagcctggtcaacatggtgaaacccagtctctactaaaaatacaaaaattagccgagcgtagtggcgtgtgccaatagtcccagctacttgggaggctgaggcaggggaatcacatgaacctgggaggcggaggttgtgatgagccaagatcgtggcactgcactccagtctgggggacagagcgagactccgtcttgggggagaaaaaaaaagtctaattgtattttttttaataagctgaagcatttgaacaacaaagatgaccctcgtgacctctcaagaggagggccactcattgactgggtagcacaaggccctacttctattagggcatgctggctggagtcctctgtgtcctggccatagcacagcctttgactggcatcatgcccattccatgaacgaatagagagattgactaaccccagtgactagctttgggagctggtaggatgattaggaaaactgaaccctcaagaaaagaaaagcatttagctcagtgctctgtcccagaggctacattgtgttgcctcttttgtccatcagttttcattttttcagacagggtcttgctctgtcactcaggctggaatgcagtggtgatcagagctcactgcagccttgaactcctgggctcaaacaatcctcctgtctcagcctcccgagtagctgggcctacaggcatgcaccaccatccccagctaattaggtgatttattttgaaagcactttgagaagcacttcactgtcaaatctgtaggtctaaaaggaaaagcatacatacacataattgatttcacattgttttacatttcctttgtcttcttcttgaatgtcatcttttttcgtggtttctctttcagcacaggatctaatctagatattggaaaagagaatccaatgggttatatgtttatcttccaccttccccactttacgtatcacataagaatattcgagatgatttcttatgcagaagaaaaaattaactgagcaactatattcagaaaaagacaggttctggctatgtgtttttacttcatatatataatctatatgagtaagtgttatcacatgcttcctctgcagcccttgtgtcagaaacactacagacaaaattatttcagaaacattttacacatcagatcctgctaggctataaagcaatcattaatttaattttgtcctccaagtgaatacactaggatcaaattatccctagtagacaagtgttcatttgatcagattgaaagcttaatagctattttacattgcacagactattaccaaagtattaaaattcttaacattacacaacttgtttttaattaattggaacccacctcttttactagcttcttatatcctcctaagtttggatagctgtttactatcacatgtcataagttaattgatctgcattcaacaattaggattgcccacagaacaggcaattggcaatggtaaggactcatgtctcctaagggatctctgtggccagagtccagttccagggctgcttagacagtgatgacaaataacgtgtttgtgccaatgacatctttgtgacagttttgattagaggggtcccagacctgaaaacattccctgctagggcctgtagcacaatgctacctttagtaagagggatgtgtgttctggtagacaaggcaaggtcataaagatgaagggctgacagagattaggagagcttgcaattaaatggtacgaaaagtgtcctaaataatcactgttcagagcttccaagtacttgactaaccaaagagacccagaaaacttggtatttcatctgaaaatttctttaaatagtgaaaaacgcaatctttgtgtaagtatctttgtatctttgtataagtgcaaagcactgcacatatatttgcaattgttgccttcaataacacttttgtgatgatatccagatgaaaaataatttaaacatgatacaataaaatataaataagtaaaattaaatgtaagtcacaaacccatctgcatttcctcaatgacctgtttcctgagaagcaatgtgctatgaaatactgagagtggcctctggagtcagctgggcctgggtacacatcctgtcttaccacaccttgaaatcactgtgatttccatgaactgactgacaaaaaccacgaggatgtaaggagggtcagaggctgtcttcctgtctgtaaggctgagctcatatccacctcacaggatcattatggaaattcaagactacaactcatatgccggatgcatgcaacgaaaaaatataacatttcacttctctaactgtaataaaatacctacattttagattgaaattgtttgagctttggatttgaaattatctgaaatcaagactattctaagaagaaaatcaaacatatgaccagaaatctaacatgaagcacatacagagaattgatagatgcttttaaattacactggtagtagagaaaaatgtaacataaatttttatgctctaattataagaacgaagggcattttagaaaaggcatttgccccctctcttagagccttccactctggcccccacaatgccttacagagcaaatctgggtcagactggatgcaacctgtgattcccaacagagacaaacaaagcaaggttcaggatgctcagtactgcgatgaaatgccaagacacagaaaagccatgtgtcaagaaggtgggagttattctttagacacatcctggtatatgtttatcattaaagatcagtggcttttgtgagtctaaaaaattaagccttaaatgttttcatcaaattccagttaactacctgatttatctagcttatattaacaatgttatttagaatttcaccttgatatgaagatgtctgtgtaactattacaaagatgtaaaacaaagagtaggattagggagggcacaggccactggtgcaatggataacacatctgactatggatgagggaatttagcctggaataaggaacttttatttccagcttagtgatgcacacaaattttcaaaataaaataaaaatcatgttttatgtgattcatgtttctcctaatgcaaaggaggacaggtactattaataaaaatatttttaaaatgtaagggctaaggccccagaagttctgctatgattttttatgtttcatagagtgattatcatcacagaacctcaagcattacgtaaatacaaatgcgtataccccaacctggtaattctgcttctggaaatttttcttcaggtccacccgcacatctgcaaattgatgcatattcaatggtatgtattgcagcactgtttataagagcaaaagactggaaacagcctaaatttccatctataaaagactaaataaattaaggtatagccctaaactggaatattatgtggctgttaaaaaaaagagagagagaggaaaagcaagaaaaagagaaaattttctacattcaaactaatagtagaaaactctccaagatacaattttaaggaaaaaaaatcaaagtcaagaagactatagaggaggctgcctttagtgtaaaacagttgaaaattataaatatattcatatgtttataaagaaattttaggaggctataaaaaaacaaaacaaagggaaagaggaacaggagctgggacacaggtgagtaaggtgtatggtaggcatatgtcttcatcttcatatacttttatttaaaaatgttggaccacgtgtacatgttatctattttaaaaattagattttaaaatacaaacaagaaaacaagaaaatgaaagtttaaaaagagcatgtggaactaccagaaaaagatactaatccatggagataatggcaaggtagctcctagatgcactgatttctctaccacattgtataaacaagccatcaactatgggatttgtaattaaaaatgagtctacttgaagcaccacattataaaaactattaactaaatctttaaagtgacagtaaatgatgacttaacattttaaagagatacagtcacatcgcatgtgtgaatgcagtcatctgtataaaatgtcatcattatcttcatcatttcttcttctgctgttttactttttgcttctatgtcgcctgcttcattgcatctaataaagcagctatttgaggccaacaaagccattttcccccaagtgaaacaaaataacaaaatagccatgaggatacttcttgtagaagaaacattaggtgtttagactgaattaatttttcctccctgatttaaaaatcacagagaagaacttagagaaaaacctgaaaaatataatacaagaacatatagaaaaggaaaccaaaatcacctttcattttactattcaaagattaccacaataaacatttgtagcgtatcttcctagtaggactaaattctaattagatgaggtaggattgcttcctttctaaaagatctactgaagataaaactgatttagttctgtttgaaaaattaactttaaagacaagaacataattatgaatgcatactttattcaaatattagcattttaagtaaaatttattttcttcacaattagaaaacatgaaaaggtatatacaatgcctttggtgttttgaatttaagaatcaatgtttgagggacttttgtgtgtgaaaataaatattcatatacatttttagttgtttaatgtttgatgtattacactgctttctattaaacaaaactttaaaaactgattttcttgtgtatctaaatctgggttgtaaatttgtttagcttaactcctgtaacaaatataatatttatttataacttgtatttggttgattcttttggaaaacttggaataccataacatttagacaaaatatttataaatacaatgattacaaaatatgttaaccttatatcacatccagttaaaaatgtgctgataacatggatttcttagtcaagtcacaagagctgggtggtctctcatctggatggctcctggtgagccctggaacatggcggtgtggtccaaggtgatttaaacctgtgccacagattattcagctaagtcctttttgcaatacagttttaagaccgtctttcatttaaatttaaatttttgaaacttagtgtccttcctaaaaataaaatgaaatgaactttcctaaagtgttgtattattagtactatctaagtcatcatcctggccttatgaaatattggcattttctactggtgtaacttttattagaagcatctcatcataactagtaggatcatctcaaaggggttgcaacacattagcaggtaatgaaatcaatgtagtgtttcctgaacggtattggatgggtggggggggaaaggaatacacacagacacacagaggaaggggtaaaagagaataagagatatcaaagtgcataacacatggataagtaagtattgttaagtacaactcttgcttcagttacacatatgtgtgtgctgggctgcaatgtaaaaatgcatttctcaatggattgggtcaaaatagttttcaagtcactgacttaagattttatcctaggggatgaggaaattagtctaagtgattacctctttctggtgggatgtttgtttaatctgtcatcttagaaaacactgctgagttcctactttcagttcattaatgtatactaccaaagctgctactcaaaggctgagcttatcttctatttgcttgttctgcgtggtgcccactggtccttactgcttttgatatagttatctactttttaaagacagtttagcactcacatatttttgttcaatctttacttctcacacaaacagaaaaaggaaattatgtattctgtatcaacaaagatttaacaaaacatccatgtactacaactgtctacttactaaaatcaagaattagtatcttttttcttcttatattaaaactgtcttttcatacgctatttttagcttatgaactgaaagtcttttagagataatttacttcaatgaactattattatttatattttataagcaaattgtcacaacttggtcttagctagctccaacgttcacttacagtctgtaatgtttctgaaagcatccatgatttcagctacaaagaagatacttaggaactattctgttttcccactctgtgatctaaaattgactggttcttcaatggaaatgagatccataactaggcactaagggtatacagaaataattgtgggcaaaagtactaatgctatttttgttgcactatattttgagatctctttaaggctctatgttcttactgatttattccaatttaatatgttatactattgcatcctactttttctttttaaatacattatgattgactgttacagactttctgttaaactgacaggaagtttttataaacaataacagcacttacattttgaaagacttgttcccattgttcttttggtccaattgcatctgaacacccaacaacaagttcatctgaatttataccaagatattttccatagccagaattcagggcgattctgtatattaataagacacataaaagttaaaaactgagagaaaattaattatagaacatcaaaacaggacatgtgtatgtgtgtgggtgtgtacatatgtaaaatttcagactggacatattccaagtgttcaaaagatgcatgtggctgagtggtgactcgctcctgtaatctctgtgctttgggaaggcaatgggagaattgcttgaggcaagaagttcaagatcagccttgacaacatagtgagaacccatctctacaaaacatttaaaaagttagctgggcttggtggtgtgcacatgtaataccacctacttggggaggctgatgcaggaggagtgcttgagcccagaaatttgaggttatattgagctatgatcacaccactgccctccagcctgggtgacagagtgagaccctgtgccttaaaaaaaaaaaaaaaaaaaaagctacatatgactagttgttgccatattggacagtgtagctttaaatttagttttatattttgcttttttaatataaacattgtaccttatatattacataacaaatattttcaaaattcatcattcttcaattatacctctttagttataaacttcaataataaattactaaaactttatgtcatcagttttccagaaaatactgcttccatttacattcttacctcaaattaacagagtatgttttgtatcatggactttttttttaaacattatgactctaaaaaaatacttgaaaacctgatatggaaaaaaacagtatcctattactttgcattttagtagttaactagaataacaattgtttctcttttcctttcctttttagtttttagattatctggtaatgttccttgtccatttttctattcagatctgattgtttgcaatttttttactggggtcttcagtgctatgaactctatacaagatacatatgaagtgtaagaactcactgcctattaagattgttgcaaatattttcctcatttgtcagttaattttctttataatccttttttgtttataattgtaaagcagtttaaaactattgaattttttcttcctctgcttctattctttgtcttttaccctacttatcagacttccaaagaaagtatagaaataatcatcttaatgtgattttttaaaattatgatttcttttaccttaccaagaatctcctcagatgccagaattgacttttagtcctttatacgttaatgattatataacagaaatcattatcatgtcaatgtaaccaattactaaaatatgcaaattcactttcagtatcttttacccaaagaatcattccatacttctgcacaaggtgagaataaaaaagggtactttataaaatgactgtaaaaatactgagtaaaaatattcttttggtcgttatgatgctgtaactttctctgctggtttcaacaatattcctttttttagtcttcctgtttgtctttagacttccaaacagtgagtttaaatatcatagcaacagtgaaccaggttttgtactatttattttttaatctatcttatttggtgtgtgaaattattagtcttcattttttaacttacaaatctttttaccagcctagcattatatattgataggaaatccactaaaagtagatcacaaaatctacttttcaaaaaagctattttgttttttatatcaaaattaccgtgggcttaagacagatactaaaatttttaatgaatacaattaaatttttaaaataactggttactaattatattacaacttaagctcacctggaatcagataatttgacagccataaactgctctgttgcactagggccctcatcaactattggagaaaaaacatttgaaaataaatttgacatttgctataaatataaagacattattttgctttaaaaaatgtggttattttcttctgcaattaaatgtaagaatattcagatatactgatgtcactgtaatactgttctttggaatcaagttctattttaccttcttttaactacagtgctaattttatacactgagtaagacagggtgatataatgcttatttaataactttcaatatagtttctctttatgttttaaaatacagtcataaataagcacttatttaaaaaagctaaatgctttcatttattcaatggatggccttgctgaccaaatgatactgctttttatcttctaattactttgtatctcattagtgcttcttctaatgagctaaagaaaattaggaagcttcaaattgttaaatgcacccaggttagttttggtaataggtctgaataaaacagaaattcaaacatatttgactcaaataggttttcttttttctttccacttactattttaattattcatattgttttgatttccaaagatactcttctggaactatacggaatgttttcaaatgcttatattagaaaaagggacttgccaattgctggtaaatattaaggaatttaaaaaaaatggaagagtcaaatgcaacggttccattcctttggaaaacgtttgagactagttaagagtttggcctaagtgaatgaatgtcctaaaatctacacttgtggcaggatcttcccttccagaggcaaaccttcactgtgtggagctcccagggtaaaaagaccactgtcgagtgcatgtatataggttccctcatccatttcaaaggctatggttcctggaatttcaccaaagtttgttaatgtccaccagattcctaaaaaataaaattgatatttcaacttcatattttagttttgacagagagttctttgttattataacttagtttaaaaaactttttattttgcagtcataagaaataatacgaagatctcacataccctttactcactgtctcaatgatgacatcttgcataagtatcatacattgttagaatcaggaaactgacattgatataatccatgaagcttattcagatttcaccagttttacatgtacttgtttgcatgtatgtgcacagattcatgtgactaccagcacagtcaggattaggtttttaaaatacaaaataagcaacatacagccaggcatgagggtgaatgtctgtaatcccagctactcggggagctgtgaaagaggatcacttgagcccaggaattcaagattacagtgagctatgatcacaccactgcactctagcctgagtgacagagcaaggtcctgtctcaaaaaaaagaccaaaacaaaacaaaaggcaacatgtgaaggtacaaattgatatatggagaatggcctctctcatgatagaccccagccatctattcatgcctgctttccagaggcaatgcctatcataatgcttcttaaaattgcctctacaggaagactttctagcatagtaatttttttttttttttctttttgagacggagtctcactctgtcgcccaggctggagtgcagtgatgcgatcttggctcactgcgacctccgcctcctgggttcaaacaattcttttcctcagcttcccgagtagctggggttacaagagcctaccaccatgcctgaataatttttttttttttgtatttttagtagaaacggggtttcaccacattggccaggctggccttgaactcctgacctcgtgatccacccgcctctgcctcccaaagtgctgggattacaggtgtgaaccaccgcacccagccagtaatcttaactgtgattttagattgaaagcaaaatgagcagaatctatgcctatgtatactaatttccaatttgccaatagaaatgttagactctagcaacaattattttagcagtttttataaaagtttctatcttaatgttaaaaaatatcctcaaacctcctcctaaattgtactttaactagagtagaaatgagtcaatcattaactggatatgacatattaaggaattcttgttaattttacaaggtctgataatgacacagtataatgtataaaagtaaagaacaaaacatgtgatgagagaaagacataccacgttaagaaatgtatatttacatacttatgggtaaaatgatgtaatatctgtgattttacttaaaattttctaggaaaaaatgtgtgtgggggtgtgtatgtaaatgaaacgagcttggcaaaatattgataattaatgctggggcctgggcacatgggggacttattatattgtatggattatattgtatggattatattgtatattgtatggattttattgtatggattagtttggatatttccataataaaaaggttttaaggattcagttaattccaccgcacaaaattttctattcaactaaacatttcatccttttcattatcaattttaaaatacataaaattttagctaaaatgaagttggacccttatataacactaaatacaaaaagtaacttaaaatagaccaaagacctaaatgtaagagctaaagttagaaaacttttaggagaaaatgggaaaagcttcacaacaatgaatttggcaatgatttcttatatagaacatcaaaggcacaggcaacaaaagaaaacacggacaaactggacttcatcagaattaaaaacttttgtgcatcaagaaccactgtcaacagaataaaaggcaacccagagaatggagaaaatatttgtaaactacatacatgatacggaattaatatccagactatatagagaactccaaaaagataaataccacaattcaaaactgggcaaaggatatacacggacactgctccaaagatgatatacaaatggccaataagcactcgaaaagacgctcaacatcactaatcactagggaaatataaatcaaaaccataatgcaataccacttcacacccattagaatgctattatcaaaacaaacaaaaaacagaaacaaagaaaaccagaaaaacaaatgttgggcaggatgtggagaaactgaaaccctgtgcaatgctggtgggaaggtaaaatggtgcatgtatttaaatgccactgaagtgtacacgtaaaaatagaaaaactggcaaattctatattctgtatattttacctccacacacacacaaaaccaatggagaaaaagaaaattaatcaaaattaaaatttcagctaaagacgattagaaagcaataaaactaatgacgatttagatgattgagttatagctacaattgttttcagtaaaagaaataatgctttattcaaaatcattatgaacagtgttatgattagcaagtctttcttataaatgtaatagttaataattttaaattagttttattttgtatgttctatgccacgttcaccaagtacacttaatattaaataaaataatttaaatataataactcattaatgttttgcaaatgaagaagaaatttctgggagacaagctcctcaaaattttcaccaatgaaatgtttagttgaacagaaaattttgtgcagtggaattaacagaatccttaaaaccttttattatggaaatatccaaactaatccatacaatataatccatacaatatacaatcataccgatcttacacagctatttccaaaaacagggaaggagacagcccttcccatctaattttatgacacctaatatcaccttgacaccaaaaccaaataaagacattacaagaaaaggatacaaaagtccaatatctcccatcaacaccaatatagaaatcttaaaaaaaaaaaaaaaaaagctgtccatccaaaaactaccattaagaaactgaaaaggtaaaactcagacttggagaaaagactgataactccatcgactcttggcaacgatgtaactggagaactaattcattgttggtgggagagtaaaatggcacaaccactttagaaaacttttggcagtttcttatatagttaaacattcacctatcctttgacacagcaattccacatctacatatctaccctagatatttacgctaattttagaattattgatttgccatttcaaaagtaatgattcttccagaacattagctttataccattccatattttatatattttttaagctaccataaattatgaagattcaaaatgcaatttgccaagttttaaaagagaaaaaaagtacggaaacaactaagtggaaaacaggctggttaagtgtgtttgggtcagtttatttctagtatcatttacaggctaccctgatattgtatttaaaattttcattcatttcagagttcacaaaatgatgatttttcctgtgaagatacttcgtttaagagacaactgacttctacaactaaaatgtatacatgttcaaagaaaataacttgtaaaatatatttggttgaataacatttacattaagcctttaaaattatgtatcagaatctctggctattaagcagtctaatggtgcctactaagtcagagagttgtaattcttctctcctgtgctctgttctgataatgaagtaaagggatcagtagcatctactgtgctaaagaataaatggaatttacaactgtaggtaatatttaagcactttaagacaaatatgaatacatcataaatttctaactaggaaaatattttcaatgagatctcaggaaatgttaacttttttcagaataaagcactgaaaactgactcaccaacatatcaaactgggtttcttcatcttcttctctttttctcttcttatctttcctcgttttcttcttactacaggacattatttatacagatgagtttaggtatattgatttgtgtgataaataaatatcgtaagattgaaacttggaagtcttttaagctgcttcatttataaagtattgatttaggaagacttacattgctatgccctcttaaatacagtactgagaagttgcttcaggctttgtacatattatgttaaagttcaaagcagattgtagagccacactgccagattttaaatcctgattctgtcacttcttagctctgtgatttttggaaaaggtactgaatctctctgggagtcagtttccccacttaaaaaattaagataataactcttaaggctattgtgaggattaagaggtaatatgtatcttcacgcattgctggtggaaatgtaaaatggtgcaacatctacaggaaatagtttggggttcctcaaaaagttaaagacttaccatatgacccagcaattttactcctaagtatgtatacccaagggaaatgaaaacatacacccacaaaaatacttacgtaagactattcacactagcattagtcacaatagtcaaaaaggggaaacaacctaaatgttcatcaactgatgaatggatgaacaaaatgttacatccatacaatggaatactacatagccataaaaaggaacaagtggtacaacaatgatggacctcaagaatgttataagtgaaagaagactgatacaaaaggtcacatgttgcatgatttcttaggaaatattcagaataggcaatttcacatagatagcagactagtggttgccaaggactaggagagagggaggatgggatgtgactgctttaatgggtaggaagagatttccttctgagatgacgaaaatgttgagcaactagacagtggtgaacctcttgaatatgtactaaaaaccactgactgtacaaaagggtgaatttcataattatgaattacatcgcaataaaaaaataaaaacccaggagcgatttgaaaaaagttaatgtgcaaagtgcctacaacaatttcttggcgcattgaaagtgctatataagcattaattatgattattacgataatcttaagacactcttgtctccattttcatcataaagttttcagaagataactcaccactcctcacaggaaattcacagagtaaaaatctcacattcattcaggatatacctgccatttattctggcatcttcatgaggccagactcctcgagagggttctcaagggcagtggcttcagctcactccttgatactttctttccatctcgcctaacaatatcaaaacctctgtttatcacggagaccaggaggaaatgctcaatatttgtatgtacagtcaacctcaggcaaatctgccagttaaaaaagaagcggggatatgaatgcacaggtatttttctcctaaagagctaataaattaccactacgacctcctcctcacatttggctcaatttatttactgcatatacgttctctaatttaatcctcacagtcttctaaaggtataaaaaatggtctgaaagtataaatgtgtaaacggaggtttaaagatacttgatctcttaatgagtaaatggaagttcagacatattaaccaatttgccacaaattacaaaattagtaaatgacggagtgcaggttccagcccatatccctatcaaagcctatatacacctcaaccactgtgtgattcatcctggtttcactctacatactagcttagaaaaaaataatcaataatttttccaggaagagacaatggagaaaagaataatccctagtaaaggaagttattatcatgaactacaagatcagacaaacgcagacccaccaggcagaggccgggagagatgcctcagcggacccaaactcgtgggtacggggccacgggtcacccgcccatctatcctgttaacagggtcgtccgcgcgggaggctgcccctctctgcacaggcgccaggaaccgcggtccagcctccgtccagcccagacagggtcagggcgaaacctgggaggccgcgaaacctgggaggccacgaagcctgctctccgcaccacggcttccaccggattcgcgggggtggagtgcatccgaaaagaactgaggaggctcccgctggagctgcaggacccagctcttcgccttggttcccttgagcacaagcttggtagacttcacataagagtactaggccatggctccgggagacttctgtgcggagaggctgaagccggctcaggacgagtgtgtgacctggagcagcaccagggcggggaggaaaagaagttgaggcaaagtaaacactccctgacagcgtaagtctgtccagaacccgccttcgtctttacccaaacgctgaatggctgagatttccacttccgggtttctgccagggagctaccgcggccgcagagggccgaaaggtgtccgcacgcatctgctccctcgtttcctctcgaggagcccctgaggatttgtgcctcccagaagtggggaaagctcgcccaaggcgccggtgctgacggtggcgggactgccgggctcgctgtggaaccgcctcccgctagagctgcgggctggtgacggtccccgcgggggcgggaagcggcttaggctgccctcgccggcctgcggcggcgagtctggaagcgcggtccactcgtgcgcgggtcactcggggctgtgcctcgcgcgactgtgtgtgcaggaaacaagcaggaaataccctaaaatagaatgaagtgccatgttgagggccgcggacgtcgcgagtgctgtgggaatgtgggctaaggtggagagttatggtggcgcgtgttacaggctcaggggtcaggaagaagcctaatcgtggaggcggcatctgaggagggtcttgaacgctgggcaggcttttgcccgatagagatggaggaagctagtcctgtctgctggaggaaacagggcagaggcgaggagggagccgtgcagcgctggtgtgaggagccgcgagcaggccaggcctgtaaagcagagtgatgggaaccaggatagagaaggcaaatcggagtcctgtggtcgctgaagaatttgaatgaaatcagtaaacaggtgacagggatccatcgcaagagcatgggatgaaacgaggagtagtccacggtgattcctccgcagcgatgggtattattaatcgcttatgtgacaccaaaacggtgggtattattgataacgtatgtgacaccaaaaccaccccactcaagttgtggctctttccctaaagtagaaaacagagaccagttgggttccaagcatccacgaagatcttactaaatttgtgatccccagtggcaccatggagtcaggattggctcatctcaaacctgactcagaaacaaaaccatctcaatgtgcagagattagcgtccttacccgctatcatattttctggtgttttcacagtgctgcgcttcctaatccccattccaccacaatccacatgccatgatgcccagaggcattaacaaaggagacacacaggggctcctcacgttggctttccatggttttgatgaaaatctgtttcctcatctcatacaatgtggttagtaatagtatcatttagagttgaagaattaaatggtacgaattatatagggtgcttattataacctacatggaaaatgcctaggatatgttagctatgctcatcaccaacatcgttatatgatggtaataatcagatagttaggaagggcgacgccaagaaaatggatacatgctctgagggaatgaatgtggagagatcagaaggtcaagaacaaagccgtacaacatgtctgcagtaaagggatagagaaaagaaaggctataaaagaaggaatgaaacaaagttagagtaaaattataaaatcaaagctaaggacaatttccagaaagggtaatatcatttaatatcatagaagtttaggagcacaagatggaaaaatggcctgtgggtaactgacattgaggcggtctttagggaaactccatttccgatagagaagtagacagaaagtcagcttgaagcagggactaggtgaagaagctgttggctggtcgcatggggaaataaataagggatcgcatatgccatatttctgggtttctttctttcttgcccagcctctatatatgcctagagtttggcgaaaacttacaaaaaataaaaatgaaaccaatttcgtttgtagactcaaatacaatgctttgtgttagaatcaagataaattcatgcctcttccttctattgtcaccatcagttttgaaattaaacatgagcttttcttcttcattaaaatcattttcaactccttccaggtgttggtggtttggggcgttacataagcagtcaggtcttgatgagtagaggaggagggaacaaacactttcagcaaagagagaattctgaaattctgctcatatttttctccagtaactttcctatgtttgtgaggatgttcagtcataaagatcctagtgaaatttttttcaagcttgactaatcttaatcactgtggacgtttgtttaaaatgtgtattcccaggcctcacacctgctgattctgattcaggagatcacggatgggactcagaatacatgtgtttgagaagtaccacaagtggttcttatggtcaggcaaatttgggaatctaaccagaaatttatgtttttatgactggcagctagaaaagattcctagagtctttgctttttgaaaataaaatatttcttttttaaaaggaaaattgtatgactagatacaacatttatacatgtggcacatgtactatactgtgtgcttttgtcatatttacagttaaagatgtgtaagaacactctgagaaaaattatatattaaatgcaaagaggggtaagtcagggtgggggagaaatgggaagggtgtgcttattgttgctaaaaggtagaaaagccagaatgatagccatctaaggttgcaaatagcacattgtaagttgagggagcttcacaatcatgtctgaaaccttctttgatatactgagttgtaaacagtggctttggacaagatttgagggagaaacaaaccatgctttaaagtgttcatttaaaaggctttaattaaaggaaagtctttgtatttacttgagctaatttaacttcaggactttaacaaattactagcccttaacctcttaaaaattgtctttcatttcaaatgaaagtttaagatggcctttgtgttggattggtatacttgtgcgaggacttaacagcaagtactgtacatttctaaatgtttacttcttaattttgctggaagaaatatactactcaattaactatttttaaagcaaagtaaaacaatttattttgacaagtgacattgtattttcctagttttcaggtggcagagattaggcttaacatcactaatcatgagagaaatgcaaatcaaaaccaaaatgagatactatcctataccagtcagaatagctactattaaaaaatcgaaaaacaacagatcttgggaggctgtggagaaaagggaacatttacacataattggtgcgaatgtaaattagttcagccactgttgaaagcagtttgaaaatttctcaaagaattgaaaatagaattacctttcaagccaacaattccattactgttttatgacccaaataaagtcagttattctaccaaaaacacatacgcacttgcatgttcattgcagcactattcacaatagcaaagacatggagtcagcctaggtgcccatcaacggtggatttgatcaataaaatgtggcacatccacacagtattattaggccattcttgcattgctatgaagaaatacttgagactgggtaacttataaggaaaagagatttaattggctcatagctctgcaggctgtacaggaagcatggtgacagcatctgatggcacctgtggagtctccagggagcttttactcatgatggaaggtgaagagggagtaggctcatcacatggccagagcaggagcaagagagaatgggagtgggggtaagtaccacacacccttacacaaccagatcttgaaagaattcgctatcacaaggacggtatcaggtaatgagagatccacccccatgacccaaacacctcctaccaggccccacctccaacactgaggattacatttcaccatgagatttataggggccaccttccaaacgatttcacacaccatggaatactatgcagccataaattaacaaaatcatgtcctttgaagcaacatggatgtagctgaaggccattatcctaagtaaatcaatgcaggaatacaaaacaaaataccacatgatctcacttataagtgggagataaacactgggtacttatggacataaagatggaaagaataaacaccaggactactagaggggagaaggaggaaggcaaggtttgacaaactaactattgggtactatgctcatgtattaatctgttctcacactgctatatagaactacccgagactgggtaattcataaagaaaagaggtttaactgactcatagttccacaggctgtacaggaagtatggctgggaggcttcaggaaacttataatcatggcagaaggtgaagggggaagcaaggcacgttctaccatggtggcaggagagcaagtgagccggggggatgtgtcatatgtttaaaccatcagatctcatgagaactcacttaccatctaagaacagcaagggggaagtctgctatcatgagctaatcacctcccaccaggtcattccccctacattgggaattataattcaacatgagatttgggtggggacacagagtcaaaccataccaaatcagcatctggatgatgggatcattcataccccaaaactcagcattatgagatatacccatgtaacaaactggcacatgtacccctgaatgtaaaatacaagttaaaattattttcaaaataagttaattaatgaataaataaatatgattaaataaaattaaaattttgaattaaaaaatttgagagtgatttcagtttgacagttatgtaagttatgtaaatggaaacagtgagttctgtagggtttggatcaattgcactatctgtactaagttcatgtccagttgtttggatgaaaagaaaataggagaaacatatagatctaacaggaaaaaaatggacaagtttttatgatagcaaaaagaagaagggaggaaataggactgaggttatagtgattgatagatattaatagacgactaagtcaaaagccactggttgcagaaaatattgattaattctgtttcattccagtcagacaacaaaatcttataacctgcctctagagaaaacccttttagccctgtaattatctttattccaagcaccattccattcattaagtagtgtatagggtgattaataagtgaattattcacagaattaggacagaatttttgagtatttcaggatattaatactataatcaatgaactaaaataaaatttgactagaggtgtgatcgccatgaatgccatgttggtatcttgttagatttggcaacctaaagttgacaaatttattaataaaataaacgttccttgatgattaatttacatttagtaaacatgctctttcttcttccttccctttcttattcattcattcattcattcctacagagcagagactttcattctaagattcccagaatcctaagaattcttgaatgtcatcatagggagccaggtgtgaggattcccaaacgttgtatttaatacttgaaaaatctcaaaaagttatatatttatttacaccagaaaaagctatacaggttttaagttatatatatatagttgaatactttttatttctatccagaactaagtcattagagttaataatgttgattatttcatactgacctggtgggtagcctttatatatcattgattacttattagtaaagtaagaacccccccaaaattacaaaataaatatattttgtggggttttcttaaggcttttgaaacataaaatcagaggagaggattaaaagtaatccttgattgttaaaaaggcagggaactactaacttagaaaattgtatgaaaacagcaagatatatacatggccctcagaccagctgcctgttttaataaagttttattggagcacatccatggatctatggtgctttcctgctacaatggtagagttgaatggttgctatagaaaccgtatggttcgcaaagcctaaaatatttatcatctggtcctttatagcaaaagtgaacccagttttagaacattcactttacaaattaggatacagtggatgctgcctcaactgacctccacttaactgatctgcaatcagcactttctggtacccctgtacaacttattgactgatgtccactgtaaactgaaagcttttgagctacttttaatgcctgtacatttctccttccatcacagaaattgtatagtttctaagaggaagctgtgttgattcctaaatatgtttacaccatttgttcttgttcttgtagctatgcgatttaattaaatattatgttgagaggctgagacgggtgaatcactaggtcaggagatcgagaccatcctggctaactcggtgaaaccccgtctccactgaaaatacaaaaaaattagttgtgcctggtggcgggtgcctgtacacccagctactggggaggctgaggcgggacaatggcatgaatccaggagacggagcttgcagtgtgcagagatcgcaccactgcactccagcctgggtgacagattgagactctgtctgaaaataaataaataaataaatattatgtaaactgagaaaatgagtataacaagagtaatattgttgtttctttgagaaataaactaaatgtgttggaaaaatgagaaactcaaacagttgctgtcagcttaactgttggcaagacaactagaaacaactgggaaaaattgtgtaatctaggatttcagattgctttaccccagttgtctttacagaaagtgaacaagaaatccatgacaacgtatcattggcatagtttccacaagaaactccactctgaacccgtgcaaggctttgaccttgtcatcaaaattctggcaaacttatttacacatgtcttttaaattaaagttaagttttaaggacttacatctaatacttcttatgattcctccatctaacttaaatttgtgattaatctgtttattactgggcccaatctgattgaataagggggtttctaccgtttttgctaaccaaaagtttaatttgacaaagatggaattataaatacaataattccagtttaaagaattagaatggtaaaggttaatacaatttagtatgcctaaaaatcacttgaaaagttactaacaatgtaaattcttgtgccttaggcctgagattttgattcaataggtctagcatgggacataggaatctggatttttaggaatgataaaggaaaattgcttaaaatagggtaggttatgacttacaaatataaaatgaacacttgtctaagatttttaactcatttatttaatgagggagccagtaagatattatactaagttttatggaaaattaagagccacacatatctaggcactaaggaacactgaaataaatttgcttgataggttcaaaactgacttcttgatggtagctggaaaaaggaaaattaattatacttccaccaaaatcaatcatttgcctgtctatagacaagaatatttgcattactatcagtaatctacaactaacagaattgcaaataacaaagaaaacaaaaggcacagagactccatagaaacagataacccaggttattctagacaaggatgagatttccattaaagacactcagtggtaatttcgttggtccatcttaaaatctttccattttctcctgaaacaaattgctcaagcaattcaaatacaatgaatgtggtcagtgggtcacacctggagaaatcattttctaacctgtaatcaagactgttgaattactcccttcactggaaagaataaaatattaccacataaattcgtattatgataatggcccactatgaatgctttggtgttcttaattttcttaagatttattaatatttctgaagtaactactaaatgccaagcaatatattttctaatttaatctttcattgacttttactttcacttcaattgagctactcattttcacggctataaacttaacttttcaataacttaaaaattgatttctaatgttataaactttaatgttccactctgtgacatgctctttcagactctctcttccttactgccaactcaccttctcttctatttcttccagtgccccagtatcttgactcttccattttcttttttcttttcttttattaagtggatacatgataatttcacatgttgatgtggcacaatgtggtattttgatacatgacacattgttaaaacctctcctccctatctttcccagtctggtaaccactcttctactctctattagatcagtgtttttagatttcacatatgaatgagatcatgtgatatttgtcttaccgtggttagcttatttcacttaccacaatgtcgtctatgctcattcatgttgtcacaagtgacacgattttaccctttattatgaccaaatgtgcatatgatatagtttggatatttgtcctgacccatatctcatgttatattgcaatccccactgttagagattgggcctggtagggggtgtttgggtcatggaggtggatccctcatggcttggtgctatcctcatgatagtgaacgagttcccaagcttcctgactagtcaaacagatgttggcattatgcttcctgtacagcccatggaaccaggagccaattatgtctcttttcttttaaattatccaatctcaggtatttctttatagtaatgcaagaatgaccaaatacagcatatatgccacattttctttctccattcattcattgatggacacttaggttgattctaggctattgtgaatagtgctgtaattaacatgagagtccagaaatctctttgacatactgatttaatattctttgaatatatacccagtagtgggattgttggattttgtgataagtctatttttaatgtttttggaagttatattgttttccataacaattgctctaatttacatttccaccaacagtgtatgaaaattcccctttcttcacatccttgccagcatttgttattttttgactttttcataaaaaccattctaagcagggtgagatgatatctcactgtggatttgacttgcatttctctgactattagtgatgatgagcattttttcatttacctgttggtgattttttttgtcttgtttggagaaatgtctattcagctgtcttgactattttctaatccaattatttgtatttttgctattgagttgtttgagttttctataaatttggggtattaaccccttatgaagtgaatagtttgcagatattttctcccattttgtaggttgtgtcttcactcttgtgattgtttcctatgcagtgcagaagtttttatttggtataatcccatttgtttatttttgcttttgttgtgcatgtctttcgatgtcttttctaaaaagtccttgcccagaccaatgacatataacatttcacctaagttttctcctactagtttcatagtttggggtcttacctttaaatatttaatttattttgtgttgatttttgtatatgatgagagataggggtctactttcattcttttgtatgtggatatgcactttcccagcaccatttgttgaaaagactgtcttttcccaaaattgaatgtttgcatctttgtcaaaaataagttgcatgtaaatatgtggttttatgcctgggttctctatttttgttccactggtctatgtgcctgtttttatgccaataccatgctgttttagttaagatagctttgtaatatattttgaaattagatagtgtaatacgtctagtgttgctctttttgcttaagatttattttgctatttggggtgttttgtagtttcacatgaattttaagatttttttaacatctgtgaagaatgaaattggaaatttgatagagattatattggatttatagattgattttcatagtatggtcatttcaacaatattaattcttctagtccatgaacatgggatatctttctatttattttaattttttaattgtttttatcaatgtttaataattttcatctttccgtggcttaatttacttgtaggtattttgtttttttaatagctattttaaatgggattactttcttgattcctttttcagatagtctgctattggtgtatagaaatgttactgattttttatgttgcttttgtatcctgaaaccttattttattcatttactatttctgattctcagtggtgtatttagggtttttttacatatatgatcatgtcatctgcaaagagggacaatttgacttttttttttttccaatttggatgccttttatttctttctcttacctaattgttctgactaggacttccattactatgttgaaaaaagtgattaaagtgaacatccttgtcttgtttcagatcctagaggcaaagctttcaagttttcaccattcaatataatgttgcctgtgggttatcacatatggtctttattttattatgttcttttataactaatttgttaaaaggtttgatcataaaaggatgtctaattttgtcaaatgctttttctgcatctattgaaacgattatatgtattttatccttcattgtttaatgtgatgtatcagattttattgatttacatgtattagactatccttacctccccgggtaaataccatttgattatggtggataatctttttaatgtgcttttgaaatatcattgctagaactgctggttttgaatgtttgcatctatgtttatcaatgatattggcctggagttttcttttatttgctgttcttatctcattttggaatcaggaaatgctgtcttcatagaatgactttggaagagttccctccttttcatttttttgaaatagtttgtaaataatttgtataaattttttaaatgttttgtagaatttgtcagggaaaaccaccaagtcgtgaacttttctttcttcctctatttctttagagacagggtctcactctatcactgaggctggcatacagtggtgcagtcatagctgactgcagcctcaaacttctggtcttaagtgatcctcctgcctcagcctcctgagtacaaatacacaccactatacctggataatttttatttttatttttagagatggagtctcgttgtgttgccaaggctaatcttgagctcctggcctctagtgattctcctgccttgggctcctaaaccgtgagattacagatgtgagctactgtgtgaagtcttttggattttccttgactgagagcctaaattgctccttcaatctcattatttgtcattggtgtgttcacattttctatttcttctttcttcaattttgataggttatatgtgtccagagcatacgtatttcttctaagtttttcaatttattggcgtataattgtttgtagtacttactcatgattccttatatttctctagagtctatcatagtatatcctttttcatctctgattatatgtgaattttctctttttttcttagtctgacaaaacatttgtcaattttacgttttcaaaaaagattcctccatttaattagtcgtttgtattttttgtcttcattttgtatttttgtgctctgatctttatattcttttgctaatttgggtcttagtttgttcttgattttatagttccttgaaatacattgttagatggtttattcattatctttcttctttattgatgtagaaatgtattgctataaacttccctctaaggactgttttgctgtatttcataagttttcatatgttctgatttcatttttatttgtcttcagacatttttgaaattaattttttattgacccattggttgtttaaggatatgttgtttaatttgtatgtatttgcacaatttctgaagttcctcctgttgtttatttctagctttattccatatggttaaaaaaacacgtgatatgatttgattttttgattagctaagacttgttttgtggtctaacatatctatcatggacaatattccatgtgcaggtgaaaagacagtgaattatgcaattgttggatgaaatgttatgtaaataactgttgaattcttttgatctagagtgcagtttaaatgtttctttgttgagattctctctcaatgatctgttcattgctgaaaatgggatgtcgaagtttcttaccattattgtacagttttttatctctccttttagatctattaatgtttgctttatatatttaagttctccaatgttgagtgcagtatatatttacaattattgtattctcttgttgtactgacccctttattattacataatggccttgtttgtctgtgtttacagtttttttacttgaagtctattttatttgatataaatataactacttctgcattctttggtttccattatcataaaatatattttttcatctgatcactttcaatttatgtgtgtatttacaggtgatgggagtctcttgtagaaagaatatagttaggtcttgtttttaatcaatttacccattctctgtcttcttactggatagtttaatctatttccattcaaggtaattattgatagataaggacttgtactgccatatgctgttttcttgttgtcttttagaagttttgtacctttttgtccctttgttgtcttcctttgtacttaagtgattttctctgtgtgtttttgtttcttgttcttttatttttagtgtatctaataaaaatgtttgccttttggttactatgaggcatgtgaagaatattttatagtttcaatagataattttgaatggataacaacttaattttgataataagaaatggggaaaagcaaacactctgctctttaattcaatcactcccccacattttgcatttttgatgtcttaatttacatcatttatatcacttatcccttaacaaattattgtagttgttattgtttttgttttgtattttaaccttcttactaaaaacatgtaagtggtttacattcagttattactatattagagcatgctgaatttgtctgaatatttatttttacctgcggatttataccttccaattttttgtattacatattagtgaccttttctttcagtttgaagactgttctttaacatttcttttaaggcaggtatggttacaatgaattccttcatcttttgtttgtcttagaatgttttaacctctccttcatttctaaatgagagctgtgctggatactgtattcatgcttgacagattttttcttcagcacttgattctattatcctactctctgctggcccatattgtttctgctgtgaagtctgctgccaggcctattggaattctctcatgtattatacgcttcctttttcttaatgctttcaggacctactctttgtttttgacgtttaaaagtttaattataatgtgtcttgtggttgtcttattcagattaaatcagattagtgagctttggccatcctaaacatcttaatccttctccaagtttaaaaagttgtctgttatttctctgaataagcttctaactctttttcattcttagttccattttaacactgtagatttgtttttctgatggtgtcccatggatctcataagttttctttgtttcttctcatttttttctcttttctactctgacagtatattttcaaagaccctatctttgagctcactgttttttttcttctacttgatcagttctgctcttgatgccctctagtgcatttttcagtttatttactgaattttccacctccaggatttccatttgattttttcccattattttaaattctttgttgaatttctcataaatttccatattgtttctctgtactttgttgaagtgcacagatttttttttttttttaaaaaaacagctatttgaatatttttgtctgccacatcattcatttgcatgtctttaggttcagttgctgacaccttgttttctccatttggtgaggcagtttttcctaggctattcttattttttgtagatgtacatctctgtctacacattgatgaattaaatatttatttcagtcttctcagtctgggtttgtttttgactgtttctcagtgggcttctttagaaattctgtgtggatttccattatattccattttagcattaggaggtgcccaaagcaaagattagacataagtcttgcaatggggcttcaccactgatgcaatgtaactggatgggcccatgggtgatccacagaaaggctgctgtctggtggggagaacaagtcaggccatcaaatctggacagtctgtgtatcatgtttcccacagtgtggtgcccataaacaacctgtctggtataatatttcctctggtaggaatggctagccactgctaagtttcatatagtaagtattgctaacccaatcccttctctatgtccctagcatgcctctggtggttcagctctgttaacactcatggtgctgcttgtgggctgatgcaggagtaagtctactgtgaaggcactcagtatggtggaaaaaatattcaacttctgttcactttattcagtgtaagaactgtgagttcaggaggactttctgcatataataccattatggcctgggggaggagtatcacagtcacagagtactgtttcccttactgtccaagcatggttttactcctctttacagtccaaagggacttcatagactcactcatgtattcggggttcattagctcttgtaaagttaatttcatatgtggatattttttcatatagatgtgtcgtaggggtatgattactggagagatctactccactaccttgctctgcccaaatccttcccctttccaacaagagtttgccaccttctagtattcttttttcttaaccaaactaagtttagccttttaatccttcaccctcctccacttcaaatgccattgcttctttgtatgcttattgtattttccatgctatatgactttcagctggttatttacagtatgtaagttttaatatcctgtaaaagggggacaataatggcatccatttgatagggatgttaaagatattaaatgacactgtccatgttaaataactttttgagatatattgagatgtttctgtacttccttgttctggccttcttgttgaaccagaggaatctattgccatgaaaagcaataaaactgttatagtagaaattaaaagtgagtaggaacttatttaaaaatcatcattctccttttcaatgcaaaaataagaactagaaaattttaataaggcaatagtccgaagaaataacttatggaagataatatgggttttttaatcttaaagggttcttttatatattcaagcttcgagattggctgccttgaatcctactaaaatttcaatgtaagttttagagagggaggaaaaagtcaaagaaaaaattgcactggaaaaagttaaataagtaaggaagatattattcaagctactgcaatactggagagagtccagacctcgtctgaactcagctcccctaacacaaagggccgtggagtttttgaaagtgagggtaagggggcgatcataggccacctgtctttgctaactgtttttttcaaaggaaaaataaactttcttttatctttatgatataaggtaatttttacaacttggagcaagactaggctcttactctctcatggagactgggaaataaggtattatctttctggaggattacgtttgaaagagatggctcccagatccttgaaaaaggaaattttctgcttacaagttacacatgccacttctacctgcatttcactggccaaacaggtcacatgtctaaatctgacccttccttcaataggacagaaatgtataatcttctaggagatagggccactacagcaggaagaccagataatgggagaatggtaatataatctaccacaatgaccacagtgaaaacattagtaatcctcagggttaaaccaagtcttcttggacacttaggttgattctaggctattgtcaatagtggaataacaaaaaataaagagaatagcccatttatttttttgcagagaagctagacaattcacagtaacttatggcctagacaattttatttcttgatcaacacaactctttatagatgcctatggtccaaaaatgaggattcctaatcgtccccaaaaataagggatcctctgcaagtcaacctgggagagagtttagtattgttctgaggcaatgaaagccattgagattcacatgtaagagggtagagaaagggaatccacatgttttgatccctccatctgatggatataacttggtcttcattacattgcaccaccgttggtgtcagagagaactagatttgaatcccagttccttcactcattatgatttgatggtgaatgtgtttttaactcgtctgagcctccgtttgctcatctataaaagatgggattgttatgagacttgcaaataaggtaagtgtgtaaaaatctgggaataatgcctgtaatttaaaagacggcgttgtgatgaggcttcaataaggtaagtgtgtaaaaatctggacacaatgttactaattttgtaggttttcaatatatagagaaggaggattatttttctctcatttaatttttagaacaagtttataaaattggtattattcatatttttgagataatcaaaggatcagtaagtttaaataaatcaccatagtaacaaagcagttcacaacatattgactggataattgctagtgaaaagtagcaatgatgatcacattgaaaatcttttgttaggtggtggttttctcttgcataagcctcttcatttgttgaaaccatagattctaaatttgctctatcaaagtgatcattagaaaaatataatgtacttagtgtataaattttagaaaatgtccttttcaatcctgttaatttgattgaatatgtgcattttgaattatgaatgtaaatatgaatatgtatgacatatgaaatatgacttgacatcaaagagtaaccttagatcgtggcaacgtttttttctgaaagcacctgcagaaatgtatcttctttgtagtttccaaaacactcagaggccatgggggaagaggggactttggctgtgagatagtgcatgaggtacataaggatacagtaatttcatcataattcatattcataattcacagtgaggaaacctgaaagttgctaccagttaccaataaatgaaaggtggggtggggtcgctggggggtgcggctttgtgagccagtgcctggactcccacgtcacaaatggaagggcaccgcgtggaaggaactcaaggtctgattggttcttcctaagcaggacacatcaggttgtcagggcaaccggccttcagttggtggccttcagtgggtgccttaagttggtggcatttggttgcctttcctggggagagggggcaggtgctcagctctgcagacgtgggggcaagcgaaggcccaagctgcctcgagaagagcagaggtgccccatggggaccacgatgaccagtcgcatgtgcaccaaagccagccccaggcaggggttctgcgaggccgtcctgtggctttgatatctatgagtgggcggccagcacaggcacaggcaccagcagaaaggagcagagacgcccagaacatgctgtcccccaatgccagccccaagcgaggccagcttagggtgcggtgggcagagccatcctgcagctctgagatccacgaggtgtaggtgggagtagggccagactccactgcattggagctcacacaatttgagcccaatttgattccggagccatgatctacagcacattggcgaccagatgacgcccaaaggtagggaggcgacagataccgtttggcctcaggagctcctctggccgttgctgaaccaaggttcccccagagacatccacagcctggggctcctcccttcttcaactagttcctttcctaggcccaggccccaagcctgaggactggctctgcctggggtctctatcccttcgtctttcactgttgcatccagccggtctcttttcccctccctacccatatgcccagttctgggccctcttcttcttcctagaggctggccaaaaactaagttttcaaagtacaaaatggatgctacagatttcgttgctgtagaggaaatgtctgacagctcttgtatttaaacttaagtagctacactgggactcacagtttcataacttgagttctagaccagagctctctaccctaaagcaacagaaaggggttagaggtactcctcttgattctaataataaaaaatgattttttggtagggacaaggtctcactgtgttgcccaagctggtctcaaacccctggcctcaagtgattcacccaccttggcgtcccacactgctgggatgacaggcaagagccaccacacatggtcgttggaggtgctcttgctttgtgtgtttcagctggtcttcaggcgcagctatctgtaagatgctcctgcagtatagttctatgtctttctgcacagattcagtggatcctgtgatttttttacatggaatagcccctttattttttgcagagaagctagacaattcacagtaacctatggcctagtacattttatttcttgatcaacacaactctttatagatgcttgtggtccaaaaatgcagattcctaatcatccccacgaataagggggccattgcaaggcaacctaggagggagtttaggattgctctgaggcagtgaaatctattgaaattcccacatgagggggcaggaaagggaatccacgtgttttgatccctccatgttctgggtgtaacttggtcctcgttaaattgcaccatttttggcatcagagagaaccggatttgaatcccagttccatccctcattatgatttgatggtgaatgtgtttttaactcgtctgaggctcagtctgctgatctataaaagatgtgattgttacgaggcttccataacgtacatgtgtaaaaatcatggcaaaatgcttgtaatttaaaagacaggtttgtcaggagacttctatcaggtaagtatgtaaaaacctggacacaatgcctataattttgtaagtgttcaatatatggagaaggaggattatttttatttcacttaatttttagagcaactttataaaattggtgatactcatatatttgagataatcaaaccaaggatcagaaagactaaataaatcagcatagtcacaaagtggttcacaatacatttactggataatttctagttaaaagtagcaatgatgatcacattgaaaatcttgtattttctggtggttttctcttacataagcttcttggaatttagtaagataagttgcagctcaaaaagcagatccgtcgaatattttgttccagagattgtagtgggggcccaagtattgcatgtgttttgttgggaacaaggtgtaggctgagaatctaagcaaacttcagttggtggttttcagttggtgggcagtggcagaaggaggaggagttccgtctgtgctctctcttcccccagtcacagccctcaggcttgttgtatccaggctcttcttagttaaaccagacaggttgacaggtttatttaacatttagcagacaagtcagctcagggtaggcgggtgaggtggggtgtgggctgctagtacagtgccgccctttgacccagggctgcccgtgcccatggggctattccacatattatatattatatatatacataatatttttatatttatgtatataagcctgttggtttgttaaaaccatggattctaagttgctctgtcaacgtgatcattagaaaaatgtgatgtacttagtgtgtaaattttagaacatttcttctgttagtcttgttaatactcaattcttttctaaaacacctagcgcaaatctccataggttttaatcgaattatattataatttggattttctggtctgcctatcttccaaataataaagttcttaaacttgattttctattgctgccataacaaattaccacaactttgtggcttaaatcaaagacttatgaccctatagttctttagggcaaaccgctgactgtggtcttactgggcttaagtcaagctgttgtcagggctgtattgctttctggaggctctagagagaatccatttacttttccaacttttagatgctgtccctattccttggatcatgggaccatccctccatctttgaagccagtaatgtgggatgtctgtgaccattgttctgtagtcatatcacattctgactgtagctaggaaagattctctgattttatagacgcatgcaattagattggcccccaagataatcaaggataatccccctaactcaaggttaatcacatctccaaagtcccttttgcccaatgtaaagtaatatggtcacagattccagggaccagacatctttatggggtcattattttgactgtcacaaaggcaaagtcttgtacttatgcatatctagattttctttgcttaatttcagagcctagaacacattagactctaaataaatgtgaatgagtgataaatattatatttacagattgctgccacattacaattctgtcctctcactggtggtggaatcatatgtactttttaccatctccactttgcattcatactgaacatggctatgttattcctttcacctgggtaatttgaaaccatctctccatttctatttgtagagatcttatctaacaagcccttctcaaatgccacttcaaaaaactttttctaatccccaattgtcttagtcaatttatgctcttacaacaaaataacacagactaggcaatttatgaaaaccagacgtttatctgtcatagttctggagactaggaagtccaagatcaaggcgttggcaggtctgatgtctgataagggctgttctctccgttcaagatggtgtcttgatgctgcatcttccagagacaaggaacactgtgtcctcacatggtggaaggcaggagagcaagagggatgaactccctccatggagccctttcatgagggctcctaaacccattcctgaggtaggagtcctgatggcctcatcacttcctgtaggctccatctcaacactatcaaattgtcaatgctgaatctcggaggaggcacagtgaaatcacagcaccaatcaagtatgatctttctgtcctcagaaaccccctcatatgtttagacctcccatgcacttttatacattttgtctcatggtttcttcctgtacaaataaggtgctgtaaatggatagctatagttttgggtttcatttcaacaaaacccccttcctagttttttgaaccccaagcgaaatatgaggacaggccctaccttccattacaaaagctgaaagggaatgcatgatcctttttccagtttcttggccacccacgtgtgggcacatatctaggcccagccaactgatgtctctttattagaacttggaacccgatgaaatgatgcaaaagacctgaaagaatcagagatgattctgagaaattgagcagagatgcaggtccaggaatgtggcagcaagtgcctaggttcagcagagcccagctacatggtgacaagtgtcaaatgacaacatcctagtggtggcatcccaagatctccttccgttgaatgaacttggctgtgctgagtttccctcagttcttaccttgcttcttcagcatcttcaatgattttgtgaactattcaatatcctttcattgaattcctgttttgcttaagttgtctagaatttgttattttcagtgaaaaatataaaccaattatgccctcacattaaaacacactccacttaggcatctcctgtgatctcactggagaaaagtgtggacgttatttgtaatttgactcagaatgataggattattttggtactagtaacagtggagataagtaactaactttttgtgaaacttcttcctggggtgaaacaaaaactattgtggaaactctttccaatcatctctggaaatttattaagtgacctagtatataatgataatttaccatgatatttgataaaatagttttgtgtgttcagaataatttcttttttctttacctttgaaaataatgcgttgatagttaattttctcctaaattgtctgtttttatttccataaaaggtatttattgaatgtctccttacttttaatataactaggcattgtgtgatcaaaacaaaataaatatgttcttgtttctggaattattgaagctttgaaaatggacttatcgacctcaaaccaatgggacatattcctatgtggccttctgccctgttaggtttcccagggtaagtggtgattccttttctgtctttttaaagattttagaaatgcagcttctgctgtgggccactaggtggagtacttcagagcagggtttgtgggagtacaaagctaactgctgcttttgcttgatgcttctgcagctcccttgactactgtggatgataagtaaccattttcttcctcttctttcttttttcccctcactctttggagtgaacttgaaacatttaggaagtttattgatcaacatataccgtgtttatgaaaatccggctaagataatatggtaggactcctttggttataaataatagaattcaaactcaaactggtctaagccaaaacatatatattaatttgtggactcgtataatggaaaaatccagggtatagcttcagaatggctgaacgtagggactcaggacttggctcctctcctcttccttgcttttttcttccccattgattttattctcagacaaggtttcctttggtgctgtaatgtggccatcatcactcctccagtttacatttccttagttccatagccccagaataaagcaaaaacagaaacacttctaatagtttcaataagagactggagattgactttgggtgtgaggcttggatttcatgtccatctctaatttcatctgtgccaggattagaagtctattcattggccaggcctgtgtcacgagctcatacagggtttccactgtccacacagtttctttgcaagtattagaaaatggctcccctttctccagttagatgcagccctgtatcggggcatgtggcttggagaagagcgtgcaggctggatttcaacccccctttctcccttagctgggtttcttccttgagtgaacaacatacttgttagtaactgtcctgttcttattcctgaaactgggggtgaaatcagcaccaacgccaaaactgaaggacagaaggtggcttcatctagggtatcagataatggctaataacaaagggaggggacagtgggtgccgtgtgggcaaaaggaacaaaaaataatcctaacttgtctagacttcatctcagaagccatatgcaaccttcttcaatggaaatatttaacacttcaggagtgcaaagaaggctataaggagcatatctcttaaggacctaagttaggacattctagaatgtatgctttatggatttaccttataaatatataacattaactaatacacacagaaaatatatttcagagtaacatagatgacagaacttgaaatacgtgacattctaccgcagtctatcattattttctaacttatcaaaagactcagaggatctttttttgtattgataaatttctaaccagagccctatttactcatgtcttgaacaacagagtatttgcaaatatgtctgaagagggaagagaaagaaagtgattacaaaaaagctgataacattaagacagctttttatagaagatgtaaatttgcaaccacaaattaaaaacttataggagatgcacaaaatgtgaagaaaaataaatgaaaccaaaccactacaagaaataaccaaactaagaagacagcaagagaggaaaaaaaaaaaaaaaaagaactgcaaaacatatgaaaaacaattaacaaaatgcaagttactccttacctatcaacaatgactttaaatgtgaaaggattaaactatctaattaaaagacatagagtggcacaatgcataaaagatactcatcagtacatatttataagggagtcactttagatataaagatacataaaggctcaaagtgaagggatgggaaaagatactctatgcaaatggtaaccaaaaaagagcaagggaatctatacttagatcagaaaaattagacttgaaatcaaaaactgtcactagagactaagaaggtcattatataatgataaaagttcacttcaatgggaaggttgtaaatatatatccacccaacattagaacacctaaatatacaaagttaatatcaacaaagctaaggggagaaatcagtaacactaaaataatagtaggcaacttcagtaccccaaattcaataatggatagaacatctaggcaggaataaaaaaagaggaaacagctgacttgaacagcacattagattaagcactgatatatacagaactttccatccaacagcagcagaatatacattcttctcaagtgaacacagaatattctctgagatagatcaaatcttaggtcacaaggcatcctacaaatttaagaagtttgatataatgccaagtatcttctcagaccacaatggaataaaatttgaagtcaaaaacaaagaaaacagaaacatttacaaaaatgcagaaactaaactacacactcttgaacaaccattgggtaaaagaagatatcaaaagggaattttaaaaatatcttgagacaaacaaaaatgaacatacaactcaacaaaacttacaggatgcagcaaaaaagtgctaagaggaaaacgttacagtgataaatacctacattaaaaaataagaaagatctcactcgaacaacctaactttgcaaataaacaattagaaaaagaaaaactaactaaacccaaagttagcataatgaagtaaataataaagattagaatataaataaaataactataaaataaaaaacaatagaaaaatcaagaaaactagagttgaatttttggaaatacaaacaaaaataacaaacccttagctacactaagaaaaaaagagaaactcaagtaaatataatcagaaatgaaaatggagacattataacaaatgtacagaatacaaatgattataaaggaaaattaagcaattatatgccaataaattggataacctagaagaaatggataaattcttagaaagatgcaatctaccacggtggaacaaaaaagaaatagaacagaccaaaagcaagcatagagatttaatcagtaatcaaaaatttcccaacaaagaaaagcccaggtgcagacgctttcatgggcaacttctaccaaacattcaaagaagaactaacaccaaaaattcttaaactcttcagaaaaaataaaagagagaatactctcaaactcatttcatgaggccgatgttaccatgacttaaaagctagacgaagacaacacaataaaaaataattacagaccagtatccttaatgaatatagatgcaaaaattctcaataaaatacaaactagcaaactgaattcaaaagcacattgaaaaggtcatacaccatgaccaattggaatttatctatgcggtacaaggatgtttcaatgtgtaaaaattaaaatgtgatataccacattaacagaatgaaagacaaaaataacattccaatagatgcagaaaacacatttgacaaaattcaatatactttcatgataaaactctcaacaaaataagtatacaagaaacttacctcaacactataaaggctgtatatgaaaaacctatatctaatattataatcaatggggaaaaactgaaagctttttctttaatatctggaacaagacagggatgtctactctcatcactcctattcaacatagtactggaagtcctagccagagcaatcaggcaagagaaaaaaaaaggcatcaaaattgaaaggaaggatatagttacctctgttaacagaagacatgattattatacattaaaaactctaaagactccacagaaaatggttagaaataatgcagtcagtctttcatatctgctggggatttgtttcaggaccccctcagataacaaaatctgtgatgatcaactccctcacataaaatcgtgtacagttggccctatgtatccatgggtccacatctgtggattcaaacaaccacagatggaaaatatgtacaagttaggttcatggttgattgagttaatggttgcagaacccattgatatgaaggactgactatataataaatatactaaagttgtaggatacataattgacatacaaaaatcattgctatttctaaacactaacaatgcattgtctgaaagggaaatttaaaaaatagtgtcaaataaactactttggaactaactgaccgaagaagtgaaagacttaaacactacaaattatgaaagattgatgacagaaatttaaaccaaagtaaattgaaagacaacccatggattgaaagagttagtattgtattattaaagtgtccatattactcaaagcaatctacacatttaatgtaatccatatcaaaattccaatggtactcacagaaatagaaaaaaaaatcctaaaattcatatagaatcacaaaaatccctgagtggctgaaggtattttgagcaagaacaaagctacaggtatcacacttcctgacttcaaattaaattacaaagctgtagaaagaaaaacactgtggtactggcataaaaacagacacataaaccagtgaaacaaaatagagaacctaggcataacccacacatttgcagcaattgatcaccctggaaggtgacaaggagagactataggcagaggatatgctcttgaacaaatggtgttaggaaagctggatgtctacatgtaaaagaatgaaatcggatccctagctcacgccttatgtaaaaattaactcaaaatggattaaacgtttaaatgtaatcactgaaaccacaaaactcctggaagaagacaggagaaaaccttcttgacattggtcttggcaataatttgtttagatatgatgccaaaagcacaggcaacaaaggaaaaatagataaatgaattacatcgaactaaaaagcttctgcacagcaaagaaaacaactaatgaaatgataaggccacctatgaaatggggaaaatgtctgcaaaccatatctcttataaggagttcaaaaaataagaaggacacacacacatccattccaaaattataaataacctaattttattttaaggcaaagaacctaaataaatacatctcaaaagaagaaattcaaatggctaacaggtataagaaaatgtgctcaacatctctaaacttcagagtaatgcaaatcaaaaccacaatgagctatcatgtcacacctgttaaaatggctattatcaaaaagagaagagataagtgttggtaagaatgtggagaaaaggaaactattacacactattgatgggaatgcaaattagtaaaacatagaaaacagtatcgagtttcctccaaaaaaaatggaaaatagcactggcctggtgtaatggctcacacctgtaatcccaggattttgggaagccaaggcaggaggccaggagctccagaccagcctaggtaacatagcaagaccccatctcagaaaaaaaattaaaattagccagacatggtgttgtacacctgtagtcccagctactcaggaggctgaggtaggaggattgcttgagcccaggagttcaaggctgcaatgagctattatcttgccactggactttaccctggatgacagagtgagacccggtttcaaaaataaaaaaaagaactaccacataatccaacaatttcacttctggatatatgtccagtgaaattgacataagagtcttagagaggtgtctgtcatcccctgttcattgcagcacgacacacaatgaccaaaatatgaaaataacctaaatgtcctttggcagaggaacagatgaatgggtaaagaaaatgtgacatgtatacataaaatgaaatattatacaaccttaaaaaagaaggaaatccttctatttgtgaaaacatggatggagctggaagatattgcaccaagcaaaaatgcaagacacagagacaactacttcaagttttcacttacatgtggaatctacaagagtcaaattcttaaaaacagagaacaggacagtgtttgccaggggctcagggaggggaaatggggtgatgttaattaaattgtgcaatgttcaagttataataatttctggagatataatgtacaacatggaacaacactgtattgtattcttgtgttctgctaaaggactagatcataaattaattactgtcaacacacacccaatggtaaatatgtagagataatatgctaatttgcttgattgtggtgatcctttcaaaaagtatagaatggggggaggagccaagatggccaaataagaacagctccggtctacagctcccagcgtgagcgacgcagaagacgggtgatttctgcatttccatctgaggtactgggttcatctcactaaggagtgccagacagtgggtgcgtgcaccgtgcgtgagcggaagcagggcgaggcattgcctcactcaggaagcacaagggtcagggagttccctttcctagttaaagaaaggggtgactgagggcacctggaaaatacggtgactcccaccctaatactgcgcttttccgacggacttaaaaaacggcacaccacgagattatatcccacacctggcttggagggtcctacgcccacagagtctcactgattgctagcacagcagtctgagatcaaactgcaaggcagcagcgaggctgggggaggggcgcccaccatggcccaggcttgcttaggtaaacaaagcagccggggaactcgaacagggtggagcccaccacagctcaaggaggcctgcctgcctctgtaggctccacctctgggggcaggggacagacaaacaaaaagacagcagtaacctctgcagacttaaatatccctgtctgacagctttgaagagaacagtggttctcccagcacacagctggagatctgagaatgggcagactgcctcctcaagtgggtccctgacccctgacccccaagcagcttaactgggaggcagccccagcaggggcacactgacacctcacacggcagggtactccaacatacctgaagctgagggtcctgtctgttagaaggaaaactaacaaacagaaaggacatccacaccaaaaacccatcggtacatcaccatcataaaagaccaaaagtagatataaaaccacaaagatggggaaaaaacagaacagaaaaactggaaactctaaaaagcagagcacctctcctcctgcaaaggaatgcagttcctcaccagcaacagaacaaaggtggatggagaatgattctgatgagcggagagaagaaggcttcagacgatcaaattactctgagctacgggaggacattcaaaccaaaggcaaagaagttgaaaactttgaaaaaaaatttagaagaatgtataactagaataatcaatacagaaggaagtgcttaaaggagctgaaggagctgaaaaccaaggctcaagaactacctgaagaatgcagaagcctcaggagctgatgtgatcatctgaaagaaagggtatcagcaatggaagatgaaatgaatgaaatgaagtgagaagggaagtttagagaaaaaagaataaaaagaaatgagcaaagcctccaagaaatatgggactatgtgaaaagaccaaacctacgtctgattggtgtacctgaaagtgatggggagaatgggaccaagttggaaaacactctgcaggatattatccaggagaacttccccaatctagcaaggcaggccaacgttcagattcaggaaatacagagaatgccacaaagatactcctcgagaagagcaactccaagacacataattgtcagattcaccaaagttgaaatgaaggaaaaaatgttaacggcagccagagagaaaggtcgggttaccctcaaagggaagcccatcagactaacagcagatctttaggcagaaaccctacaagccagaggagagtgggggccaatattcaacaatcttaaagaaaagaattttcaacccagaatttcatatccagccaaactaagcttcataagtgaaggagaaataaaatcctttacagacaagcaaatgctgagagattttgtcaccaccaggcctgccctaaaagagctcccgaaggaagcactaaacatggaaaggaacaaccggtaccagctgctgcaaaatcatgccaaaatgtaaagaccatcgagactaggaagaaactgcttcaactaatgagtaaaataaccagctaacatcataatgacaggatcaaagtcacacataacaatattaaatttaaatgtaaatggactaaatgctccaattaaaagacacagactggcaaattggatagagagtcaagacccatcagtgtgctgtattcaggaaacccatctcacctgcagagacacacatagactcaaaataaaaggatggaggaagatctaccaagcaaatggaaaacaaaaaaaggcaggggttgcaatcctagtctctgataaaacagactttaaaccaacaaagatcaaaagagacaaagaaggccattacataatggtaaagggatcaattcaacaagaagagctaactattctaaatacatatggacccaatacaggaacacccagattcataaagcaagtcctgagtgacctacaaagagacttagactcccacacattaataatgggagactttaacaccccactgtcaacattagacagatcaacgagacagaaagtcaacaaggacacccaggaattgaactcagttctgcaccaaggggacctaatagatatctacagaactctccaccccaaatcaacagaatatacatttttttcagcaccacaccacacctattccaaaattgaccacatacttggaagtaaacctctcctcagcaaatgtaaaagaacagaaattataacaaactatctctcagaccacagtgcaatcaaactagaactcaagattaagaatctcactcaaaaccgctcaactacatggaaactgaacaacctgctcctgaatgactactgggtacataacgaaatgaaggcagaaataaagatgttctttgaaaccaacgagaacaaagacacaacataccagaatctctgggacgcattcaaagcagtgtgtagagggaaatttatagcacttaatgcccacaagagaaagcaggaaagatccaaaattgacaacctaacatcacgattaaaagaactagaaaagcaagagcaaacacattcaaaagctagcagaaggcaagaaataactaaaatcagagcagaactgaaggaaatagagacacaaaaaacccttcaaaaaattaatgaatccaggagctggttttttgaaaggatcaacaaaattgatagactgctagcaagactaataaagaaaaaaagagagaagaatcaaatagatgcaataaaaaatgataaaggggatatcaccactgattccacagaaatacaaactaccatcagagaatactacaaacacctctacgcaaataaactagaaaatctagaagaaatggataaattcctggactcattcactctcccaagactaaaccaggaagaagttgaatctctgaatagaccaataacaggatctgaaattgtggcaataatcaatagcttaccaaccaaaaagagtccaggaccagatggattcacaccgaattctaccagaggtacaaggaggaactggtaccattccttctgaaactattccaatcaatagaaaaagagggaatcctccctaactcattttatgaggtcagcatcattctgataccaaagccgggcagagacacaaccaaaaagagaattttagacctatatccttgatgaacattgatgcaaaagtcctcaataaaacactgacaaacagaatccagcagcacatcaaaaagctaatccatcatgatcaagtggatttcatccctggaatgcaaggctggttcaatatacccaaatcaataaatgtaatccagcatataaacagagccaaagacaaaaaccacacgattatctcaatagatgcagaaaaggcctttgacaaaattcaacaacacttcatgctaaaaactctcaataaattaggtattgatgggacatatctcatattaatcagagctatctatgacaaacccacagccaatatcatactgaatgggcaaaaactggaagcattccctttgaaaactggcacaagacagggatgccctctctcaccactcctattcaacatagtgttggaacttctggccagggcaatcaggcaggagaagggaataaagggtattcaattaggaaaagaggaagtcaaattgtccctgtttgcagatgacatgattgaatatctagaaaaccccattgtctcagcccaaaatctccttaagctgataagcaacttcagcaaagtctcaggatacaaaatcaatgtacaaaaatcacaagcattcttatacactaacaacagacaaacagagagccaaatcatgagtgaactcccattcacaattgcttcaaagagaataaaatacctaggaatccaaattacaagggatgtgaaggacctcttcaaggataactacaaaccactgctcaaggaaataaaagaagatacaaacaaatgaaagaacattccatgctcatgggtaggaagaatcaatattgtgaaaatggccatactgcccaaggtaatttacagattcaatgccatccccatcaagctaccaatgcctttcttcacagaattggaaaaaactactttaaagttcatatggaaccaaaaaggagcccatatcaccaagtcaatcctaagcgagaagaacaaagctggaggcatcacattacctgacttgaaactataccgcaaggctacagtaaccaaaacagcatggtactggtaccaaaacagagatatagatctatgggacagaacagagccctcagaaataacgccacatatctacaattgtctgatctttgacaaacctgagaaaaacaagcaatggggaaaggattccctatttaataaatggtgctgggaaaactggctagccatatgtagaaagctgaaactggatcccttccttacaccttatacaaaaatcaattcaagatggattaaagacttaaatgttagacctaaaaccataaaaaccctaggagaaaacctaggcattaccattcagggcataggcatgggcaaggacttcatgtcgaaaacaccaaaaccaatggcaacaaaagccaaaattgacaaatgggatctaattaaactaaagagtttctgcacagcaaaagaaactaccatcagagtgaacaggcaacctacaaaatgggagaaaattttctcaacctactcatctgacaaagggctaatatccagaatctacaatgaactcaaacaaatttacaaaaaaaaaaaacaaacaaccccatcaaaaagtgggcaaaggatataaacagacacttctcaaaagaagacatttatgcagccaaaaaacacatgaaaaaatgctcatcatctctggccatcagagaaatgcaaatcaaaaccacaatgagataccatctcacaccagttagaatggcaatcattaaaagtcaggaaacaacaggtgctggagaggatgtgggcaaataggaacacttttacactgttggtgggactgtaaactagttcaaccattgtggaagtcagtgtggcgattcctcagggatctagaactagaaataccatttgacccagccatcccattactgggtatatacccgaaggactataaatcatgctgctataaagacacatgcacaagtatgtttattgtggcattattcacaatagcaaagacttggaaccaacccaaatgtccaacaatgatagactggattaagaaaatgtggcacatatacaccatggaatactatgcagccataaaaaatgataaattcatgtcctttgtagggacatggatgaaattggaaatcatcattctcagtaaactatcacaagaacaaaaaaccaaacacgcatattctcactcataggtgggaattgaacaatgagatcacatggacacaggaaggggaacatcacactctgtggactgttgtggggtggggggaggggggagggatagcattgggagatatacctaatgctagatgatgagttagtgggtgcagcgcaccagcatggcacatgtatacatatgtaactaacctgcacaatgtgcgcatgtaccctaaaacttaaagtataattaaaaaaagaaaaagaaaaacaaaatccccaaaagtatagaaatatcaaaacattaagttaccttaaatttatacaatttgtatatgtcatgttatcatgatacagctgttaagaaaggtttagtaaatcatgtctacaacctgggaagtttctcattacagggagggctggagtaggaaaatggaattttgcaaaaaggatagggtgagggacatggaaaatgattgatcaagtatttaagaaatgacctgggtggaagctacatcagaggttatgagctttagcacatcagtcctcaaacttgttggtttcaggaacacttaacatttttaaaagttattgaggacctcaaagagcttttatttatttggattatgtctatctatatttatcatattaaacattaaaactgagaaatttaaaaaaaatatacttatatgtttatgtaaatcacatttttacttaaaattatcatttttaagcagtaaagttggtgagaacagtgacattgttttatatttttaggtatgtctttaatgtctggtttaatagaagaaaacttggttctcctttctgcttctatgtttaatttcttgtgacatcccgtgtcaggtagcctctgggaaactccagttatacttgtgagagaatgaaagtggaaaatgtaaacaaaacctgtgtatttttatgaaaagacttttgaatttgcagagcccctggaagggactcaggggcttctcggggttctctggctcatgtcttcacagagtagagggtaagtccgcaagagaaagcagtgattggctgtgggagttcttgctgagaggtggtagagaagagattggatgtggagaaagtatggtcgttgttttcatttcttttccctgtcctttgtcctcttgttgctgggatttcctctttagatgatcgtattataaattagaaattaatgaacattcttgatattgcctaatgaaagtttttgttttgtcttcctgagtcttgatacatttcaagaagtcttctatctcatttatttttcccacccaaatttggaatttaggaagagttgatatagctatatttagatgatttatctccctgaagacattttgggatcatttataaatctctataaacaatgctctgatgtccctttattttctttagagactgggtcttgccgtgttgtctggagtggagtggctcgagcgtagctcacaatacacaatacaatcaaactcctgggctcaaagtgatccttccactcagcctccacagtagctaggtctgcaggtgtatgccagcacgcctagcttttgattactattattatttttgtagaaatgggggtttcattatgctgcccaggctggccttccaactcctggcctcaagcgatcctcccgccttccgccgtctgaggagctgagattacaggtgtaagccaccatgctagtcctgatgtcatttaaatacaaacatgatactatattccttgtagaaagtgctacataaatataatttttttgaaatagggtcttgctgtgtcacccaggctggaatgcagtggtatgatcacactcactgcagccttgacctcctgggcttaagagatcttcccacctcagacttccaagtagctggcttctgaggtatgagccaccaagcccagagaatttttcaatttttggtaaagatcggcgtgtcactgtgttgcccaggctggtcttgaactcttgggctcaagttaccctccgcccaggtgtcccaaagtgctgggattacaggcctgaaccactgcaccgggtcctaaaaattcattcactttctttttttgtccacaaggggctgctgtttcccttctaataaaatgagacagctcacttgagaacatcaagaacatgacattctctaaaaaaaatcacagtagttccttttccataactattaagttttcaaggtgttatcaggtttatttcatagaaagaatgtgtaaaatttttcatgtagaaacataatcttttagcaatgacttagttaaaaaatttggcattgtcagaatgaagatttccttttccctataattttatttattataattatatttttaatgacatcaattgctttataaaaactcattatgttatatacccaatgactgtgaaatcatctgctttgaagcacagtgaaatcatcaatcagcatagtgggtctaacacagttccttccattttaagaaagctatttacactccaatttgcaagttggactttacaaaattaaaacattaataaaatatactaactatgattgttttaaaaagtaatggttttttatggtaaggaaataaattgaagctttgtgttggaaaatgcagaaaacaaatcagcattctttataaatagatcttactgctggtttagaaattaccttatgtgctttatagatgatggaaaatgaaatcagctgcagttagcagtgtgcatgcatcgtatttgctgtgtcactttcagaaaggttatggaatattggcaggtcaggattctcaaaatgataagttctaagaagaggctaaatgaaaaagaattttaaaagcaagcctagttgtttaatatatacatggacgagttatggggaaatcctggactgggaactagcagatcaatgttctgacttttactaagtcattggctgctacagcaggccgagcagacataactgtcaaggctgcctgggagttgggttgattggcaattggcacagggagagagaacaattgccagaataatggccaaatattcagagtttcatgttcagtgaagcaggacgtgcatttgtattccaagggcaaaagtgatgctagaatctgggcttcctggctgaatctgagtccacagtctgatgagtaggatgaagtagtctcagaaatccaagccagccagaacccatgaggtgtgctctgcagacattggctggcgagctgcattaagatgtttcatttcattgagcaaacattccttgattggttaggttagcctcccacaaaagcagagacaaattcttcagaatttgtccatgaagctatagtcccagagcttatatttcaagggaggagggaggaaacagcatctcaggatggtaggtgattacagctaaactgaattctgaaaataaaaggaaccctatgtctttgtctgctcaggctgctgctacaaacaactgtagactgagtggcttaaacagcatatacttgtttctcacagttgtgggaattcaaagattaaaatctgggccagcagagccagtgtctggtgaaggccctcttactggtttgcaggtgttcttgttgtatcttcacatggctgagagaagagggctgtagtctcctgctcttcttattaggatgctaaccccattgtgggaactccatcctcatcaaaaccaaattacttcccaaaggtcctccttctaatgccattctactgttagagtttcaacatgtgcatttgttgatgcaaacatgcagtgcacagcatctaatctaatcaaatcagttgtcccttgaataaaattctagctcctataacaagactcaaaattatgacttggttgttgccaaaactgtctatctggatttgctagaaatcaaacattcttgaatatttcttctaaagattttctcattcctaccctattgtgtatatttacagaattcttaaataattacatatacaaggcttctattagctctgacgacagcttctattagctttgacgattgcaagcagctttatagcactgtaggtaaaagcatgtgctttgaaatcatacaataaatttattaaatgctaagcattttatattcactatttaattttatcatcttaatcaccttcattattacctccattaaaccctatttgttggctacttatattattctgattttgcaaatctaaatttgagaggctttccctatgtcacataagttaataagtggcatagctgggatttgaattaaagtctacctgattccaagatctatttaccattgttctacaatatgtactttttaggtccctgagaatgctaacagcctttcttttgaaatctaccttctttctggatagcagctttattaatatgtgattagggcaccacatttcaggcaacaaattctttgaaatctttcatttccatagtgagataaggatcagttctgtggcattgtcagccagaaaacatcatttggagacgaccttgtacaagaagtagaagacacagctgggggccggcggaggacagaaaactcacagcttctgtccatacccctttcacttcctcctcaaggagatggacctctgtggttggtcaagcttaaggatcttttatgggccacagctaatggtgaaatcttcctaactctgggtgaagattaatgggcaagttggagagttaaggtagcttgtggctgctccttttagaagaaagtctgatcaatgctctcttatttgtggaacccctctgttcccccaaatgcttggtaagacatgcctgaagaccaatcctgtgtcagtagacttcatatctactctcttctaccaatcacacaactacagacaaataagaaaaataaaacaaagctcagacacactcccctggcatggaggccactctctggctggctgcttttctctaccctggcacctcctgggcgtttggctctttcttagatcaaagcgagacatgggtttgggattaaagagaagaaggtgaaaggggtctctggcctgctttggcattagaccaagtaaataacagagttctgacttaagctcagttccgtagagctttctctgtgtttggggaaaatctctgatagtaatgaagtgatattttactgttcttccttttctgtacatatatctctttcttaggtatgttgtgaggagatttgttcccgggacaaatatatttctcaaataataagtcttgaaagtcaaaatgatgccgcaatccatggactacagaatagatgttgtgttggcaggcatgaaaccagcatgtgtttccctgtacatctccattagagctctttagttaccaggtacattgtcaaaaagctgaagtatttgaagtgaatcttttttctgagctgtaggtctcaacagtgggattaaaatactcagtaacccatgcggtaaacagctctgatgtcatccaagtgttgttgttccatttatagagcacgggtagtgtagatttagcataattcttaagaggtgccctaggatttatggaatagcaaatgagcattggcttgtaacaagaaagtcagcctgtcctttaaatctttttctttttcttgatataaggtctcactccattacccaggctggattgcagtggcatgatcttggcccactccatacttgacctccttgaccccacaatcctcccacctcagcctcctgagtagctgggactagtagcatgcaccaccatacatggcttatttttatttatttatttattttttgttagagacagggtttcaccatgttgcccaggctggtctgaagctcctaagttcaagccattcccccacttcagcctcacagaatgctgggattacaggcgtgatccaccctgtctggcctctaaattcgtgttatggagactcattttcatggttaaaatgtcctgaattgactgtggcctgttgggaggcgggatggaggaaactacttatggaaaatgaagaagaaagggaagcacatcagaagcaagaaagtgtcatcaatttttacgtcaaagactccatgataaaaagaaagtacaggtggtttgttatcaaggctgaccattggactgtggactgcacatacatctaccaggttcttctggatagtcacagttttaaatttttgacctgatattcatgaacacagtgctactggtcagacctttgtccaggtttaagcttcagaacataatgtcttcatgcagtgggaggcctggttagggttatgattctgccctggggcatcagccccttctggcctggaggtaaacttggcatctactacttacctctacacttgaacagccaaggatgggctgagcacagaggctcacatctgtaactccagcactttgggaggccaaggcaggaggatcgcttaaggccaggagttcaataccagcctgggcaatatagtgagacctcatctctgtaaaaacaaacaaaaccgaagatgggtgggtgacatggagcagttcaacatgggaaaccattaatctgagagctggaaggacccttagaccagccccccattaacagatgagactctgccctgagattatagcctaaggtaatgcattgagcttttctagagatttgaaaataatcaatcctaaaacccccaagcatactgctactgtttgttattgaataatgttttctagtctgggggtgatggctcctgcctgtaatcccaacactttggaaggttgaggcaagtggatcatctgaggtcaggagtttgagaccagcctggccaacatggtgaatccccgtctctacaaaaatacaaaaaattagcaggccatagtggtgcgcacgggtaatcccagctgcttgagaggctgaggcaggagaatcctttgaacctgggaggcagaggttacagtgagccgagatcacaacatcgcactccagtctgggctacaagagtcaaattccatatcaaaaataataatgataataataatgttttctacaagcaaggagttactttgtactgtgaactggtgnnnnnnnnnnnnnnnnnnnnnnnnnnnnnnnnnnnnnnnnnnnnnnnnnnagccattacaggcttgagccactgcacccagcttgtctgtagtttttaaaacaaaaacggccggggtggtggctcacgcctgtaatcccagcactttgggaggctgaggcaggtgggtcacgaggtcaggagttcgagagcagcctggccaagatggtgaacccagtctcttctaaaattaaataaattagccgggcgtggtggcgggcacctctagtcccagctactcgggaggctgaggtaggagaatcgtttgaacccgggaggcagaggttgcagtgagccgagatcatgccactgcactccagcctggccacagagcaggactccgtcaaaaaaaaaatttaaaagattaaaagttaagatagatttttacaaatatatatatctaccattatagtgtcatacagaatggttttagtgccgtgaacattctctgtgctctgtgtatccatctcttccttccccttggtccatggcaaccactgatctttctactgttcccatggtttcaccgtttccagaacgtcatataattggaatagaacagtacgtagacttttcggattggcttcttcttttagcaatatgcatttaagtttcctccatttatttttttctggcttgatagatcatctcttgctagcagtgaataatatcccattcacattatacttttttcaagactcacaatgtacagcgtgaagagtaaacgtgaatgtgcactgtaagctttgagtgataatgaagggtcgaggtaggttcctggttgtcacaggtgtgctcctgtgaggcaggaagctgtagtggggaggctgtgtgtggggaaagggacatatgggaagcctgtactctctgctccgtttagttgtgaacctgcacttctctaaaaaataaaattagttaaaattgaaagccaaaaattagagaaattaaaggattacaatgtgtcatatagttttcaaatcacaagatagaaaaagacataataacagaaagtatagaaaacaacaaggataggaatacaacatcagtgatagaaggcagaagacagacacgtacagccaaacatattattttaatgattatttatattcatttatactaatttatattgatgtaacatattaattttgactaaatggcattaaaagaggtttgagtaatttgtgtgtcacattctggatgagaggactcaataatattaactctttagtttgctgtaaattatttaaaaatatgctcaaattccaataaaaattccaagaaaaatatttttgaacaagaaaatgtgattttaaattcgtctgttgagcacacacatgagagccaatattataaaatttaagatatttaatattattactattcaaagtaaacaaatttgaaatggcacaaaaaataacacattaatgaaagagaactaaaaacacagaaattgagtgtaatttnnnnnnnnnnnnnnnnnnnnnnnnnnnnnnnnnnnnnnnnnnnnnnnnnnaacaataaagtcatacagataagtaactaaaataaagtaaagtaatctaaaaaggccgagcatggtggctcatgccccaaatcccagcactttgggaggccgaggtgggtggatcccctgaggtcaggagttcaagaccagcctggccaacatgctgaaaccccatctctactgaaaatacaaaaattagctgggtgtggtggcaggcacctgtaatcccagctactcgggacgttgaggcaggagaatcgcttgaacccaggagaaggtgcttgcagtgagctgagattgtgccattgcacttcagcctgggtgacaagagctaaactccctctcaaaacaaaacaaaacaaaaatctaaatgttattgagttgaatatttaaacttttaattgacatttcaaattagattctaattccacttaaaagagcatctcatagaagcaaatgtactcaattatattaactctgtagtttcatttaagcaatttgttttgtgaagggacacaaagccaaccagattttaacagtgtataaatatgtatttattaatttaattacaacgacaatactctcaactccccatttgaatataggagagcatctgatctgtgttctgggacagcatgcactataggtgtgtggaaataccgatgccctcagctgtgtggcaggctcagtgggacctggagtgcaggagcccctgggccattcacctctggccacaaaagtcattgtctatttacccccaactgctatagaaatactattttcagtggttgttatgttgcaaaagaaaagaagcagggagatttattaaacttttacatataagatatattagtaaataaagtctactttcttctggcttaactaaaaatctatactagtatttatgccttttggaaattagagatgccattttaaatattttgaagcaaagcaactgagtattaggtaagacagccaaacacaactgcagaattgtagaggttatgtgttacatgtataagaatatgtcatagcaataatcttttaagactctgtgaagacactccacagtgaagcagaaattagaacagaattaataatactgtgtatgctctcagttcaccaatttatcaaaactagctttatgattcaggagggtgtctgctcttttgcaattggaagaaaagaaagaatattttattttttgactctttagattttcttcactaacagtatttccaaggctaagtaacactaagagaaaaaagcggtcttgagcagctttttaaaaatggtcttaaaatatggaaaatgaagccaggtgtggtggctcactcttgtgatcccagcaatttgggagcctgaggtgggaggattgcttgaggccaaaagtttgagaccagcctgggcagcatagcaagatccccgtcattgcaaaaaacaatatttttttaaaaaaattagctggatatggtggtgcatgccttagagtcccagttacttgggaggctgaggtaggaggagctcttgagcccaggagttcaagtctgaagtgagctatgattgcaccactgtcctcaagcctgggcaacaaagtgagacctctgtctgtctgtctgtctgtctgtctctctctctctctctatatatatatatatatacatatatataaaatatatatacatatataatatatatacatatatataaaatatatatatatacacatatatataaaatatatatatatatggaaaagggaaggggccaagaatatcaaagacattgaagaagaggaaagatttgtcctgccaaatatcggaagttttataaagctacagcaattaagacagtgtggtcctcactgatacactgactaatgaaacagaatagagagttcccaagcaaatctccaccaatttaatcttcgatatgtgatgtaggtgacatggcagatcagcaaggaaagaaatgacttttcaataaatagaataaaaaaataatggttattgatataagaaacaaaatgaaattatattcctacttcattctatatacaaacattaaattccagatggacaaaagacttacatgtcagaaacaaaactttaaaactttaagtagaaaatgtaagtgaatgagacacaaaaagccatttaaccattaaaaaagattggacattttgactatcacaaaattaagaactttttacatcaaaaagtggaaagataggctgggcacagtgtctcaagcctgtaatcccaacagtacatcacctgagatcaggagtttgagaccaggctggccaacatggtgaaaccccatctctactaaaaatacaagaaattagccaggtattagtggcagacacctgtaatcccagctacttgggaagctaaggcacgagaatggtctgaacctgggaggtggaggctgcagtgagccactgcactccagcctgaatgacagagtgagactctgtctcaaaaacaaaaaatataaattaaaaaataaaagtaaaaaagtgaaaagataaactataaattagagaagatatttgcagtaactgaaacctacaaaagattaatatcatatcaactaactataaggagctcctatgaattaattttaaaaatagcagcccaacagaaaattgggaaaagacaataatagggatttaacaaaagagaaagcccgcaaaacataaaaattttctcaacctcattagtaatcagggaaatgcacaagatactacacatctattctctccacaaatattaagaagtttgacaataagaaatttattagtccatattcacactgctgataaagacatacctgagacagggaagaaaaagaggcttaattggattaagggttccacatggctgaggaggcctcagagttatggcggtggatgaacagcacttcttacatggcagtggcaagagaatatgagaaggaggcaaaagaagcaaaagatgaaaccactgataaacccatcagatcttgtgagatttattcactatcacaagaatagcatgggaaagaccggccctaaagattcaactacctccccctggttccctccccgaacacatgggaatcctgagcaatacaattcaagttgagatgtgggtagggacatagttaaaccatattattctgctcctggcccctccaaatctcatgtcctcacacttcaaaaccaatcatgccttcccaacagtcccccaaagtcttaactcatttcagtattaacccaaatgtccactttctaaagtctcatctgagacaaggcaagtctcttctgcctatgaccctgtaaaatctaaatcaagctagttacttcctagatacaatgggggtacaggtaattgagtaaatacagctgttccaaatgggagaaatttgccaaaacaaaggggttacaggccccatgcaagtccaaaatccagcaaggtagtcaaattttaaagctccaaaatgatctcctttgactccatgtttcacatcaaggtcatgctgatgcaagacgtgggctcccacagccttgggtagttctgccactgtggctttgcagggtatagcccacctcctggctgttttcataggctgatgttgagtgtccgcagcttttccaggctcatggtgaaagctgtcagtgaatctactattctggggtctggaggagagtggccctctcctcacagctccactaggaagtgccccagtagggactctgtataggggctctgaccccacatttctcttctgcacagccctagcagaggttctccatcagagcaccacccctgcagcaaacttctgcttggacatccaggtgttttcaaacatcctctgaaatctaggtggaggtttccaaacctcaattcttgacttctatgcatgtgcaggctgaacacaacatggaagctgccaaggtttggtgcttgcactcttaacgccgtggcctgagttctatgttgtcccctttcagccatggctggaggcgttgaaacacagagaaacaaggccctagtctacacacagcacagtgaacctggcccagcacaggaatccattttatcctcctaggccctgggcttgtgataggagggacttctgtgatgacctatgacatgccctgtagacattttccccattgtttttgggattaacattcagcttcttattacttatgcaaatttctgcagacagcttgaatttatcctcagaaaatgggattttcttctctatcacattgtcaggctgcaaattttccaaaactgtatgctctgcttcctttataaaaccgaaggcctttaacatcacccaagtcacctcttgaatgctttactgcttagaaatttcttccagcagataccctaaattatcactctcaagttaaaagttccacaaatctctaggacaggggcaaaatgctgccattctctttgctaaaacataacgagagttacctttgttccagttcacaagaagttcctcatctccatctgagaacacctcggcctggaacttattgttcaatacactatcagcacttttgtcaaagtcattcagcaagtctctaggaggttccaaattttcccacattttacagtgttcttctgagccctccaatctgttccaatctctgcctgttaccaagtttcaaagtcacttgcacatttttgggtatcttttcaggagcaccctactccactggtatcaatttactgtattagtctgttttcacactgctgataaaggcatacccaagtctgagaagaaaaagaggtgtaaagaaaaagaactgtaattggatttacagtcccacatggtaggggaggcctcagagtcatggcaggaggtaaaaggcacttctcacatggcagcagcaagagaaaatgaggaggaagccaaagcagaaactcctgataaacccatcagatctcatgagacttattcactatcttgagaatagtacaggaaagactggcctctgtggttcaattaccacaccctgggtccctcccctaacatgtgggaattctgggagatagaattcaagctgggatttgggtgtggacacagccaaaccatatcaccatatatggagagactggatcaacaagatcatgtcgaactaatacagtcggtgagagtttaaattagaacaaccactttggaaagcaatttggattatcttataaatttgagcattctcatatgttatggcaaagtaattcctttaccgtaggccctggagaaactcttgcccatatgtaccagaagtagtaaaaaaaaaaaaaatgctcatgtaatgccattcataatggcaaaaatctggaaataaaccaaatgttcattaataggagaatgggtaaattaataggagaattggtaaataaattatacccttaaaaactaaataatatgtcatttagggtaatcatatgtatacaataaaacaatgtttttattttaaaggaagagaatcctaaacataaattcagggtagtagttaccctcgggctgaaggatgaaaatcaggaaaaaggacagaggaggagcagatggtagggtcagaaccctagttctttggttgtgttgtaagttcacaagtgattactctattgttcaaatacatttacacagaggctcaggcacagacaaggatgaaataggagccaaggtgtgctatgagccaaggattatgattaatccaattttgagcactttaagccatttgaaaaacagaaaaacaaaacaacaaaataatttttaagaaattgaatatagggtgctatgctctgaatgtgtccccctaaaattaatcaccaatgtcataagattaggaagtagggcttttaggtagtgattcagtcatgaagggagagtcttcacaaatgggtttaggatccttacacaactggagggagtgggcttcccctgttttgcacttccgccttctgccatgtgaggacacagtgcatctcctcctgaagacacagtgcacaaggtaccatcttggatgcagagaccaggccctcaccagacaccaatcctgctggcaccttgatcttggacttctagcctatggaactgtgagaaatacatttctgttcttcagaaattacccagcctagtgtattttcttatatagtagcacaaactcattaaggcacaatgcctcttgacattttcttctacaattttctttgttgcctctttagcactgggtcattttatatttgatccttcattatatctcttactttcggtttttcacatttctgttccaagtgtattcttagatgcatattttccactattaattagcctcaggggttgccagggagtgtgtgtttctgtgccaccactgtaggactgtgtgtgtgtgtctcccattctctcttttctctctgtctctcaccctctgtgtgtttctttccctctctctgtcggtctgtgtgtgtgcgtgtttgtgtgtgtacgcccgtgtgcgtgtgtatctttggacgaatgtgctctgttcgccaaaatgcgattttttccatgtcggccagtctttgttgagcctctctgcctgggtcccgtggccggttgtccatcattttcacggcggttccactttgggtttttgaagtcctcgatcacgtgaggagacgcgtcggtcccggagcaatcgaagtctcatccccatcctgagcggcctcttttctaggatcaagaggaccacactccagcccaggacaaaacccaacagcagctcattgtccggcaggagaggagcagacccacctccaagaagatggttgtacccctgcacggctcttctctgagcaatgaagccacaccacgatacaattctgaggaggaagccgggaatgggagacggcaacaatccctgtccctggaatgctggcctctctggacaagtcacgcgtttcacacccctccccttatgcccgtggcagtggcaaggtcctgtaacctgcctgggctctggcctctgctctgtcctccctcttgctctgtctcccctgtttctgaggggcctagttgcctcttggtctggctaataacttctacgaagatcgcttcccagtccatcagggagacactttctggagatgcgtgacatgactctttctctctccaaacctgtttctgctggattgggcaggtctgataagcctggaacacttggcttccatgcgtgtctcagacagggaagcttctttggtctccttgcttcacctcatgggtgggtggattgcctagaataagcgctaggtgatcatgactggccttgtcttctaggacaggtggtgtcccatttcctctgcacgtcctgtcttacaaatgagggatatcctctcctctgctcataggtggactgattccttgaatcttttggctgtaatgaatgtcaggaaaccaaaggaactgggctgggcctggggatgggtttggggctgggtgcagggaaggttgcgtcagggctacctgggcggtggaggcttcggggtggggtgaatgttgcagaaacctgtgtgctcctctggcaggcatttcaaaatgtggcttggactgaggcacaggccctgtccaggttcccaggtcttctttgagttcccttggcactcagggaaaggccacttgatccccctttccactgggcacatgcctggacaccactgttggtttcgccgtcaccccatttgcctccggtgacgcacattcacaccatctgctgtgggatatgccagtgccacgcgtgatcgcattgtctccacctcggcttcacaccgtccctgtttgcacctgtcctggaaagcggtgtccgcttgcaggagccccagggcttttagaagcggggcacgccactgctctttcaacggaggagggaggcagagggctcacggatcagtgaactttcagctgacaccacgccttgagggccatgggatcattctgtgctgcagcgaggacctgcctgcctcaccagatgtgctgagcccatcctttctaacccggaggggtccaaactaggatctgaagaggagtcctgagaacccagcaggcaccctgaagatccccctccataggtggaagtcggctcaaggaggtcctgaagactggactcctggggggttggcccggggacaggatactcaagcactcctctcccaccccgccccaaactggacctcagcccccacgccacagcccccactttctccccagagctgagggacagacagagaattgcgactagaaattcgatagattggtatgagggaccacgtggccaggggctggccaatgaccaggccgcccgggatgagctaataatggaagcaatttgtaactttcagtaactctctaggcctgggtaccggagggagggaggcgggcagaggaggggagatgggcacccccagtttttccatcctcctcattcgtctaggggcacccgaatcccctattccttatttcccctatcactcaggcactggcagggtccttttcccactcctgttggccgccgcggctccaaagcgaggtaagctggtcctctacccctcaaactcttcacaaccctcatcccgtttactagcacctgcaaaccacagcctcccttcctgtcccattagtgaatttaaatcggattttgtttttcctcttagttgaaagaaaaaaattctttttgtattcttttgtgtaacctatctcggatttggagaaaattttaattcaaattaatacacttatattggggggggggtgagaggtactttcctccttttcaataaatttctatacttgctactttatggagagtttacttttctttggggatgagttacaccttatgttttcacatgtgttacttctttaatgataagtgcaactcctttctccattccatcctccaattttgctatttataaatatcacctaatggatttagagtttattcatttttctcctccctcactagtttttcagctgttacagaatcaccacaatttatttttctctgtatgtggatgaggttttgtgttgattcctctttttgttttgtaaatgaatttattgtttgggaaactcttggggtggtgtgtgtaaaaaaggtcttttgattaattccaacctctcctcttctgaagaacaatttgcttgaaatgttttgtgtattttcctcatttttattatgtttaaatttgaggtattttaccttctttaaaacctgacctctttttaaaatttaaccttttgcatgttaaaccatttttaaggtttttattttataaacggcaatggttagtagatttacttgcctttccctgacctccttcatgcgcctgcctcctccatctcaaaactcccatccccagcttccacaattctcagcttccaacggactcatcctcccctctcctcccagcgaaggacggatgcctgggaagtagacagtgtccttcttgggtcagaacctatgctctggttctagttcaggacacctccagtctcacctccaagccggcaaaacgagtgagagcagaatttctgtccaactttttcatttgggactaagttctttccacttggctgtattctggagaactctgatacatgaaattgaattttaaattctcattttttccctaaattctaagaaaagtgcaggcagattgtttttcttccttaaatgtaagctgttagcttaggggtcagccctttgggtcttttacctcctgggggagacttctcagagagacatacagtgttgattcttccttttagtttttgttaaggtagaaggggcagggattggggaagcccatattgatctctggctctagctctgaacaaagaagggtagagagctggcctggggacttgtccctttagtcagtaaggtttggcttaggagagagtttgaagtaaatcccagctctgaggaaattcttctttttagcattactgtgaaaataaattattaaaatagtgtgacatggcttcaaactattcagattccttgaagtaacaaaaataaacttacaagagtaatttgtgtttcccaaagatccgcctccagtgactgtccatttctctcagggaaacagaacccaactgggcagaagtaaaaatgccgcccctcccctttcagttccccagtcacattgacattctgggcacatttggcccagcccccgtgcctgcttctcccaagtatgaatctaagttactattaataaggggccactccaagttaattggcattaaaagaattcatttcaatttgttaatattaaatgaatgctctgcactttagctcccttcttcaccctggattcccagatgagtgatgggaagagggggcagggaagtagaatgaggattttatttctggctctccagcttagccactgtggtgcctcccctgagggtgtgcgatcaggcacagtgggggactgcttggggaaagtctgatgttcttttttggtgaaattcatctgtttcagcaggagttgtgggggatggtgggtggggagcagagggagagggacagaattgtttgggggacttcgtggggagcggagggactagggagaaagtgggaagggaaagggatggaggtcaacaggagttttggagaacaagggttgaaggctgtggggggtaaagcagattcgtgaagaactggtgataggaactaaacaacccacctagaaggggaggggcttcaagcaggggtggggaggtgggatttgaggcaaaacagctaggagttctgaaactattaatatctagctgtgtgactcagggcaagttgcttaacttttctctctgccttagtttcttgacctgtaaaacagggatactaataatagaacttatctcagggggttatttggaattagaagaaatacatgccatgtgttttccacagtgcttggcacatagaaactgccagtaaatgttagctctttttatggcagagtggttaacaggatggattctggagctagacggcctggttttgaatcgcggtcatgccttatgtgagttgtatgacctaggcaagttacttaaccccttgtgatttagtttccttgtctgtaaaacggggttaatagtacctagctcaaaggctgctgtcaggattaaatgagttatatgtacgaagagcctggaacaatgcccatcccataggaaacactatgtaagcattagttgtcattgatattgttgctcttctgatctaggaaggttgaaaatagaggcacaggtgagctactacttacaggctaagattggaatcagatcaactctttcactcctatccctgaagctagtcctgtaactgggtctgcatatgtgggcttggggagagatcctataaccctggaagctgggatatccaagtccttcctctgctctagctcttgggttggtggtccctccaagacccatagactcgaagtcacttctttttccctgggcagggttggggtggatctggtaataggagaattactttcttggtctaataactccctttagtagagagttagtcctgggagtgtgagttgggggaggttgggtagagcagaggagattaaatatcctttatgtaccagctcacacacacttgacctcaccagagggttgggaagacagagattcaaagagattaagtgatctgacaaagtcctaaagctagaacttggcagagttggcatctgaactctgatctgcttgatgacaaacttaaagcccttccattgctgcatgctttttgaagggagggatgggacacatttaaacttgggccaggaccatggggtagatggaagatgggcaaagatagagtattggagtgggaagtggtcaagcaggaatttttcaatcatggaagatttcctgagaaaagagattccagatcagggttcagatggtaggggaatgaggataggaagtaaagaagagggagggagccatgcattgacaaggaaggagaagaaaaaagaatttatgcaaaggctggtcagagtaatggacatgaatttgatttgccttccatttgccttaccatttattgaaggcatactatgtactaggtacatacatgatcacatttgatgttcacaacagccctgacaagtgggtttcttatccctatttccaaaagagatcattgaagttctgagagcttaatccccactttaggttacacagtagtagctggatttcctggcatcagaaccctcacctaggctgcctctgagcatggcttctgtgtcccagtctcaatttccatgactgtttcaggtcctcctgttcccccacatttgtagtcactcttggtgactgggaacaaagggctagagtgtgagctgaaactgagacagggagtggcaggcaggcagtggggacagaaacttttctcacatccacccatgtgaagaagatggacagaagggtggtctttctggagggaggcttccaagccactttctggagactgctgatcttgggatgaatggcagggaccttattgggtaggggatggatggtcacattgttttctgggctgtagactttatttcccttcctttgggaagagaagaggaagaggacagctcaggtgtgggtttgagccctggattaagactgcccattgtccactaaaatctcttctttccttgctgcccgagggtggagagacacccagctggacactccatttcccagctgctcttgttgccaggtgtagacacaggggaatgtgaggcgagcatgtcctcaaagcctgacggcactgggtaaattctcctttgtgttctctctttcatgagctgggcagatgtgcctgagacaggtttgaccaggcaactgaaaatatatccctaagagaagacaaaacaaagatatgaaaggaacacacttccctgactgactaggaggaacagagctgcctgctgactggaaccgcttcctcccagactaagtgagaaataaacttctgttttctatatgctactgtgttttggggcctttatgttatagcagttttgctgtcatcctttctaattcaccttctcacaccagatatttcaaattaaaaagattatatcaggccaggtgcgatggctcatgcctgtaatcccaacactgtgcgggactgaggcaggtggatcacttgaggccaggagttggagaccagtctggccaacatggtaaaaccccatctctactaaaaaatacaaaaattagctggacacagtggcacactcctgtaatcccagctatttgggaggctgagacaggagaattgcttgaacccaggaggtggaggttgcagttaaccgagatcatgccactgtgcaccagtctgggctacaaaatgagattctgtctcaaaataaaaaactgattacatgagatcacagaataactataatgatatttattgggccagatagtatgcgaaggactctatgcacattatttagtgtaatctatgtgacaatcctctgagatacgtgttactattattccaatttacacacgaggaaacaggttcaaggaaggtaagttatgtgctgagggacacacaggaggggttggggctggatttcaagcccactgggtgtgcagaactgagcctcttcaccgtgggggaaaatccctcctgaggacagggctggaaaagccatggagatcatcttgtgcttggacaagcctctcgccagtcaccacagggccctgagactcccattcctaccttcaagaagctcagcaggctactactcatgttcatgttgggtcactacatacggttttatttgaaggaaggagcccagagttaaactcatgtgaaaacccctgataaattcagtcccctccctctttttactggtgaggcccagagagaagatatgacttgcttaaggtcgcacacttagtttctctgtcaatctttctaaatctaggacgagttctcttcccactgtatcaggctgcctcaacaaacagggaagtacaaaaatagccaaatccaggaaggagggcagtggtctgtgtctcctccaataatttcatgggacagccaagcctatttccttgatttcccttgtgcccctcctgtcggatatctgctttgggacccatctcttttgggcttgcaaagagaacgggctgcatcagttctctgccctccgcatcacccagatggtcaaacatgcaaagggaaaggagagctggggccagagccaaggcaggcaaagagactcctcgacaccctccagtctttccacatttatatttttggaatttcaggctccctcctccccctggacctttcctagtagcccaccagggagaagaagaaggaaaactgccataaatttctcctatttatacaagatgacagagtttcttgtgccagaaaaaacacagaaagggagctgtcaggggagaagggacccagccctataccttctggggtcaatttatctttccgaatcgtggtttgggggctaccctaacattgcctgtatgaaatgcaggctttgacttggggcaaccaggccagacagcccctgagctttgttcctgatcacagttttcctgcttcatttcaacttccccctaccccttacactgtctttttaaaaaacaactttcttgaggtataattcatgtgtcatacaattcaccatttgaaatgtacaattcagtggttttagtatattcacatgtacgtcaaaccataaccatagttaattttagaacattttcatcacctcaaagagaaatcttgtaacctttagctatcacctccctatcctcccatattccttcttgcccttaataacactaatgtactttcagtctctgtagatttccctattctggactttcatatgaatggcatcatataataagagacctactgtgactagcttctttcattgagcatagtgttttcaaagttcatccatgttgtagcatttatcagtacttcattccttttcaaggctgactaatattccattgtatggatatatcacactttgtttatccgttcttctattggtgaacatttgtgttgttttcaccttttggatattactattctctctttcctctcattctctagacatcttggatagtatccagtgaggcctgtgggcaagaatgggtgtttcttatatttgggaacacctaatatccatgaaagcacggtcttggcacatgtctgctttcatattaagtacatgtactagctggaattttcctacctctattgttactgaggtggggctgctccctcctttttcaattctccctttttatcacgattgctatgttggaaacttgctgactcttcagactaggggattcagatccttctcttggggcttcagagacatggagtggatgaatgaatgtcttcccatgagggaagagttccctgagtctggtctcaagtgattctccagtgcctcacagtggaaggaaggtctgtgaagactccagggtcgagggaaagttatgttcttggatgtatgactgagcccagaatccaggcctccagtttccatctccttgcctggaccatttcagtcttcagacatgctttgaggtcaatccagtcactcacccagcaacagacactgcctctgccctcatggaccttgcagttctagtggtgagagtaagatgaatacaagtgaacaaaatgatggcaagttgttccagcttgttcaaacttctaaacactgttcaatgaatgaatgaaccnnnnnnnnnnnnnnnnnnnnnnnnnnnnnnnnnnnnnnatttattggaccagacatacaccaaggagtttctatagttcattaattttcaccctttgaattaggcatcaatatttccattttgaagatgagaaaaaccaaaactcatggtttaagtagctatctgaaatcacacccatagcagtaagtggcagaacatttgctctggacactgggataagtatgtgtgtatgggttttttttgttgttgttttttgttttctgtttttttttgttgttgatgttgttgtttgtttgttttcgggatggagttttgctcttgttgccccaggctggagtgcaatggcatgatttcagctcaatgcaacctccacctcctgagttcaagtgattctcctgcctcagcctcctgagtagctgggattacaggtggcggccaccacacctggctaatttttgtatttttagtagagacggggtttcgccatgttggccaggctggtcccaaactcttgaccttgtgatctgcctgcaccgacctcccaaagtgctgggaccacaggcgtgagccactgcacccggccatgtatgtgtttttattcctaacacttcataacaaatgccaatatctcttcctgcagccttacagagggagctgatcagtttcccctcctgcccaaaggcaaagcagccacagtggaagtgccagagtcctccctcacagccttctgtctagtggttattcccgcttcaaggctaaggaagggaaggacccgttttgctttcaaaggctttttccttccagcccttgctgtgcacccgttgtgtgtgggagggaccatgagaggcctggatattgtcaataaaagacttgaacaagccaaagagctgatgatgttgaccagaaggggaccttaacaaggcagataatcaaaagttgatgactgacagcccctttcgcatcccttcaccctctactaaatcaggtctcttacatgatcttgatgacaaataataaaaattataaacacattacagttttcacatgcatttgttcacttctcacagcaaatatgagaggtatctaaggctgagcagtttattacagaaaaaagtttatgggactagaaccttaattttatgtaacaaaatttatatagagcttaccatggatcatgtactctactaaatagttcaaaactttcatttttagagagatgggtgtcttgcagccagggacagtggctcacacgtgtaatcccagcaatttgggaggctgaggtggacagatcacctgaggtcaggagtttgaggccagcctgaccaacatggtgaaaccccatctctactaaaaatgcaaaacacaaaaattagctgggtgtggtggttcatccctggaatccggagactgaggcaagagaatcacttgaacccaggaggtggaggttgcagtgagctgagatcatgccattgcactccagcctgggcaacaagagtgaaactccatctcaaaaaaataaaggggggagcggtcttgctatgttacccaggctggtcttgaactcctgggttcaagcaatctttccacctcagccttctgagtagctaggactatgggcccaggccaccaggcctggctgtatctcataactattaactcatctactttttcaccaccatgtgaagtaggcattactgttattcacattttttaagatgcagaaactgaggcatggtaatcaagtatcttgcccaaggttgtacagccaacaggtggtagaacagggatcctgagcccagccccagcatctgtgtctaaccacttcaccaggtgggctttgcatggggactacacttgaaactatagtttgttagtctggggcccctgcttccgcctgcctccctcagtctttatggcccactggaaaaagcaagccagagctgtggcttccagggtgatgatccttcagctgcctccttggcactgtcattccctcctcccatctcccgccaagggctacagccgagaataccacagacggtttgccatggatcaagatttctctcaagaaagagctcacagaaaggctgctgtgagaaaggaagtcacttgctactccccttattcctccatcaggaggagcctgatgaggtcactgcacatttgagtgggtgctatcaaagcacagcctctggccagcgtggagacaaacgtgggctgtgtggcccatgactgagtggctgaaaggaaacctgaggtggtagatgatggaactgattgaaataaaacttctgtaggaatgctgcatgtcattcattcaacagtgctccctgaccagggcccagggctgtgcatatgagctgcaaatgggtttgttccttcgtttatatatctatttgcttatttattcaataaattctgattatgcccctaagaggcactgtgctagatgtcaaggatgaacaagacaaaatcccttccccacaggggctcccggtctagagaggggaggaggaaggaagatgcacagtgatttgtatcatatgctgaggaaagagagtcatttactatcgccgtttgacatcctcacccccagtgcggtccttctctttgtctctccatgctgggagtgggcagtccctgccctgctgcccttcagacacagccctcttccctcaagctgccctctgcctggatcccaccttccttgtgagctggagtatttgcgttgaaggactcttgactctccttccctgtcagtcactgtttggctgcaggcagtgacagaggtggcaataaagcagcagagagaaggctttggtatcagagcagggactcgcgggtggaatgggacggggatggttttctgtttgcctcactgtgttctctgtgctgctctgcccagggaggctgacctctgcagactgtgtcacctgggccccctgatctctcggccaatagaggtcccagctgagaacggggagagaggagtcagggtatttgtttcccccattccctgtcagcccccctttttgcctgcctgaagctctggtggtggttgtggttcctccatggtcacagctttgctgagtggcctctctcctgtgtcctgtgagcacagttggcatcgggctttggtagagatatttctatcctggtgccacactagcccttattagttttcttcatctggtctatgcctttagaaactgtcacatcactaaacccttcagtgaaacactttcgaatgtgtcatttattctctgttgccaccctgactggctcacctgggtgcagaggaggtggggacagagcaggttggggctccagttcagctttattatccctctttttcagggtttcccagaggaagagagagaatttggacaaatgaatgaggaacaacgctctcctgagggttttctttaaggggcaaggatcaatgcctctagatcctttgaaagcagagttaagaggcagtgcaggaaggcacagcaggaaggttcatggttagactacagagaaggaagcagccactgctggggacctaccctgtgctggtcactgacaagctgtctcattaaaccttcccggaccctcaacccctcctagtatcttatcctcattttacagatgagaagactgcggcccaaagaggtaaagatctggggagcaggatgggagcttcactttgtctcagttgctctggcaaagagaagcctcaccttgtgatcaagggattgggagggtgacagataaatcttggcttaagtgtcagcataacactgggaatctggagctagacggcactggcttgactccttggatctgcctcttactagctgtgtgatactgggcatgcctctgtttccccatctataaaaatggggctaatgataataacacctgccttacaggttgtgtagaaggttgaatttgtagttatgaggtgcccaggaacagtgctagcacacagtgagcgccatacacaagtgttaaagaatggagcctcctgctctctccttattttccaccccctgccctcttatcattgcccacttcccctgccttctcctcgccatcctgaaaaagggtgaagagccacccagaaacccctgaacaggcatgttggtcccaggccctttgtgagcatgcttttccctgccctgccccctgtcatcaccattctggatggagcagcaaggacggagacacttatttgggttatccactccaggtccaatgccagtgggatcagcttcgatgggatgcgcacagactgacctcttctccccagccccttcaacttcccagagctgcagggggcctgggagttcttggtaacagcacattaaacctctgtttgtgggaactttaatttaaacataaattagaaacggcaaatgactctggcagccagataagccatcccgggagaacaaggagaaagccaagagaatcagcccagataaggcctgactttaaactaatggtgatacccagaagcctgggacagatgaaatctaggggtcctgaatgaagaaccccagaagctccacaccccagttgtccttgctctgggctctatgtcagctccctctcctgtgttctctatatttctatcttattgcaaaattttatcctgattctttggctccatccctcccacccccaccctactgttttagagaatgcactttctttactttgcttctcatcttcttctgtgacctactattctgagaaagttctacttgttatctaacctccatctatgctactacctttagagtctaatacatcctgcttagtggtagctctgggagtttctgttcatgtggcaaatgtggtgtagtaaaaacaacctgaaaaagacctgggtgaactctgcatctcagtttcctcatctgtatgatgatgagcgtgtgagaaagaatctctaaggacttgtaaactctgacttctcacagagaatctgaggacaaggacatccaaggaaatctctattgttctggaacccatgaattttccactgttctactgtttgggagtgagcgtggggagagcagtcaagcctgttgattcttttctgggaggggtctacaggcttttcttccacccttccacccacaacccaggctcagtccaggcccaggcccaggagagaggctgcctttccagttctgtcaaggcctgctgagcccagctctgtggggctgtggctgctaagatgttgtctctgtcctctggggtaggagaaacatatgttccctctgtcacagcacctgtgagggtggcagagggatggcaacccccaagagggcagagttccatctctccaactgacctcaaagcatctttttatcctgcttttctgggaggcttaaagtgaaggcagagggagatatcacacagtcccaaagcccccactaaatggggagctactgtctttcatctttcatgcagggtgaaagaagacacctcggctacagcaagaggaaagaaggtcaaaccacaggcagaactttcaggttgaatgttagagcagactgtgatcccaagaggtcatccaagagccttggtctcagaggatgcctatgagaccctggtccctggctggggtgggaacaataatcccaacagccccatgccagactgacttgggagtcagacggtccctgggactagaatagaaggactttggcattttccctcgcctagggcccttagacagaagtgggcagctgccatcagaagcctggggcccagctgtgtctccaccttccccacctcccccctcctgagtgcctggctgcccctggtgccccaggcttgcctgccatctgggcagctcagaggagagcccactgccaagggagtgccagcattgatttatggcccacaaccttggcaggctcaggctgtgtgcccgaaccacctttgctcagggaagagatgctcctcttaaatgaacagtgcagaggaatgcaggaatgtccaggacgaaagcttagcagggggctggcaaggaagacctccacccatcacactctgggtgactgtcactccctagggaaacttctccctagggaaccacccatcatacctgttatcataccctatcctttgtagacttggcccaactgtaacatattaatatgtttactgtcagtctctcccactggacagtaatctctaggagggtaggaaccagacccatttgctcattcctgaatattcagcacccagcacagtgcctggcgcctaataagatctcagtaagaatttgtcaagtgtaggaaagaatgaataaatgaaggtccttgtccatgaggtggagggaagcccacgtgtcttcttagtgcctgccatgctttccgagactctgcagcatctgctgctacccccaggatctctccctccgggacccttcctcacccctgtcatatcaacccaggaccaatggggccaatcttatctggatacccttgcctccccacttgccttgagtcacctttcttaagtccttcacacaatgttcttttcctcccattttccttcctccaagatactttctcagattacctgtggcctcagtcctggattcagatactctttcagataatcttttatttttttatttttatttttattttttatttttcttgagacagaggctccctctgttacccaggtgggaatgcagtggcaatcttggatcactgcaacctgtgtctcccaggttcaagtgattctcctgcctcagcctccagagtagctgggattacaggcttgtgccaccatgcccagctaatttttgtatttttagtagagacgaggtttcaccacgttggccaggctggtctcnnnnnnnnnnnnnnnnnnnnnnnnnnnnnnnnnnnnnnnnnnnnnnnnnnnnnnnnnnnnnnnnnnnnnnnnnnnnnnnnnnnnnnnnnnnnnnnnnnnnnnnnnnnnnnnnnnnnnnnnnnnnnnnnnnnnnnnnnnnnnnnnnnnnnnnnnnnnnnnnnnnnnnnnnnnnnnnnnnnnnnnnnnnnnnnnnnnnnnnnnnnnnnnnnnnnnnnnnnnnnnnnnnnnnnnnnnnnnnnnnnnnnnnnnnnnnnnnnnnnnnnnnnnnnnnnnnnnnnnnnnnnnnnnnnnnnnnnnnnnnnnnnnnnnnnnnnnnnnnnnnnnnnnnnnnnnnnnnnnnnnnnnnnnnnnnnnnnnnnnnnnnnnnnnnnnnnnnnnnnnnnnnnnnnnnnncaagttagcaaatagatacatgcaaattttgagacctgttgtgaagtgagtaatcacagccagggtggagcagggaaccctttaaattgggtgatcagctaggcatggtggctcatgcctgtaatcccagcactttggaaggctggggtgggcggatcacctgaagtcaggagttcgagaccagcctcaccaacatggagaaaccctgtctctactaaaaatacaaaaattagctagacgtggtggcgcatgcctgtaatcccagctacttgggaggctgaggcaggagaatcgcttgaacctgggaggcggagattgccatgagccgagatcgtgccattgcactccagcctgggcaataagagcaaaactccgtctcaaaataaaataaaataaaataaaataaaataaaataaaataaaataaagtaaagtaaaataaaataaattgggtggtcagagaaagtttctctgaggaagtgacacttgggctgaggtttgaagaatgagagggagccatgtaaagagtgaggtaacagcattctagaaacagttcagtcacctgggtgtgcacagcagcatttgggggatgggagtgggaggggagctttcccaaactgcacactcctatctcttttacattttgaaagcccctgcccttccaatgtgggaggaccattgcttaaaatctttggagaagcagccctggccttacctggaagctggttagtaaacagagctcaggtgccaccccagatctacttagtcagaatctgtattttaaccaggtcccaggttatttgtatgcacagtggtgtttgagaagcagtgtttcaggaaatacctcacaggaggaatggagtgtgaggacatcggaggatgtgaggtgggtggggttggggggttggttgctgaagagtggatttgaatcagagatgggggtctgagtgtgtatatgtgcctctctgtgtgtgttcctccagccctaatgactgtgggctatctgaggatgtgcatctccaagcgcttttccttccatgggtgtggagnnnnnnnnnnnnnnnnnnnnnnnnnnnnnnnnnnnnnnnnnnnnnnnnnnnnnnnnnnnnnnnnnnnnnnnnnnnnnnnnnnnnnnnnnnnnnnnnnnnnnnnnnnnnnnnnnnnnnnnnnnnnnnnnnnnnnnnnnnnnnnnnnnnnnnnnnnnnnnnnnnnnnnnnnnnnnnnnnnnnnnnnnnnnnnnnnnnnnnnnnnnnnnnnnnnnnnnnnnnnnnnnnnnnnnnnnnnnnnnnnnnnnnnnnnnnnnnnnnnnnnnnnnnnnnnnnnnnnnnnnnnnnnnnnnnnnnnnnnnnnnnnnnnnnnnnnnnnnnnnnnnnnnnnnnnnnnnnnnnnnnnnnnnnnnnnnnnnnnnnnnnnnnnnnnnnnnnnnnnnnnnnnnnnnnnnnnnnnnnnnnnnnnnnnnnnnnnnnnnnnnnnnnnnnnnnnnnnnnnnnnnnnnnnnnnnnnnnnnnnnnnnnnnnnnnnnnnnnnnnnnnnnnnnnnnnnnnnnnnnnnnnnnnnnnnnnnnnnnnnnnnnnnnnnnnnnnnnnnnnnnnnnnnnnnnnnnnnnnnnnnnnnnnnnnnnnnnnnnnnnnnnnnnnnnnnnnnnnnnnnnnnnnnnnnnnnnnnnnnnnnnnnnnnnnnnnnnnnnnnnnnnnnnnnnnnnnnnnnnnnnnnnnnnnnnnnnnnnnnnnnnnnnnnnnnnnnnnnnnnnnnnnnnnnnnnnnnnnnnnnnnnnnnnnnnnnnnnnnnnnnnnnnnnnnnnnnnnnnnnnnnnnnnnnnnnnnnnnnnnnnnnnnnnnnnnnnnnnnnnnnnnnnnnnnnnnnnnnnnnnnnnnnnnnnnnnnnnnnnnnnnnnnnnnnnnnnnnnnnnnnnnnnnnnnnnnnnnnnnnnnnnnnnnnnnnnnnnnnnnnnnnnnnnnnnnnnnnnnnnnnnnnnnnnnnnnnnnnnnnnnctccactactgcccgctaatttttgtatttttagtagagacagggttttgccatattgtccaggctttctagaactcctgacctcaaatgatcccccaccttggcctcccaaagtgctaggatttcaagcgtgagccaccccacccatccagctaccaatggctttgtgacctggggcacatcacagaccctttctaagtcttagttgcctcatagatactaagaggggacacagtgttcttttggttgcctccagctctgatgttttgtggttctaacaaggagtccttgtttggaaatggaactttggaatggtttggatctcattctggccatagagagggcatcattgcaactgtggcttcagggccaatgtgcggttaaggggggctgagtcagaacagccccctcttcctcgatagtgccatcctgtgagtataacccctgtatgggtgttggacacagtgttggggaagactgtgcaaaaggggtaagtaggaaagaccctgtggtagggggttagctgggtatccatggcaatgcctgaactactcatgccttttgcacaagtaggtcttcaaataatctcttctgcttccctctttcccaatctttccctgtctaaggtgtgtggtggtggtggtgtgtgtgtgtgtgtgtgtgtgtgtgtgtgtgtgtgtctaacctgattgggagagtaagccaaatggagtgaagtggggaaacatccccaaaagtcccaggtagagacctaaggattcctaaatcacagtgcagaacagggtcctctacccttttccaattctgggaacatcctgaagccagtcattgtgggagagagacatccccaacccagcctcacagaccccacccctcttccatgctttgccctaccctccttccgtgtgcttgtatcctaaccttaagccctagagacttctaggttcccagagagcagcctattcagtgatgtttactgagcgcatgttatgtgccttgcactgggcctggagcaagggctaaggagtgaaattagacctgatccctgtcctgaagatgtcacagctgagtaggcagaaagactttaaacaaataatggcaacacgatgtgctaaggaacatcaatgtacaagataacaggtagtctgtatttatgggagagggaggcgtaaaagaagatgcttcagctgctttctaaacatgtttgttgtggaacattaaaaacatatcaaaacagagcagtatagtgtcctcatcatgcagctgcaacaatagtcacaccaggatcttggcgtgtctatactcccacccacgttccataccccactgcaccattacttggggtggaactgggttggttttgaaagaggaacagcaattccccaagtagaaagtgctggagggaaaagtttgcaggcagaggggatgctgtgctcagaagcttgagcagtgcctgatgctggtgcaccaaaccgaagctgaaggagtgggacaagatgctttggcccccgtgcatgctggccctaatgcatctgtcacacagcttgccttgtggctccttttggaactcgggtctccaggcaagtcttcagcagagccaggttagcgcagagccagccctttgagtgcagggagtgaggaggcaccgctaagatggcgggccttggctgggcgtccgcggggccttggagggcctgagcgctagggactggcacgcaccagcactgacgggtgcagtcaggccctccaccccgcgtcagcacgcggtcttaaatattaccccagagttttcaattatctctccttaatggatttgcaagggctctttcatcaagcgcggggtggctgggtgtgggggtgaggggagcacgcggcgagggctggaactgggaaaatggcccatatttcaatattaaagccctttaccatcgtcagcagcatgaaagatgctgcaaattaaacggagccgcccgcgccagcctctccatctcgcaagttttaattaacgctgagggggaggctgctgacgggcgggtgggagccgggccggcggcgaatctgggagcctgcggatcccggattccgaactggagcgtcagggatctcacgggccaggccaggcggaggcggagggtggtggtctccgagtcccgggtgagggcgcggaagatgcccatggagatgggcaaggctgaggggtgggggacaggttggaaggtctctgagcatctgaccgggaaacaaaactctgcaactgaatgcaggaagctttgttcttaaaggtgagggggcttgtggccaaatcatcgagctcttcatccccaggctccttcagcgcgcgtccttctgactctcttctttagaccaacatttcccccaaacgctcccccgcgttgattaccggtcccctcccacctcatcctgtggccccttgtttcgggaggcaggcgtgcttctgtgaccccgcggctcctgttctgggacgtctgctttctccatcactccctggcttcccaggcgggccccatcctccggagcggagcggagcagagcgcccagaagcgccactgttctgccttggcagggcctggcccgacagcttgtgcctgcgcagcagacccatccgtcaggcgggaaggatggagcgatgtccagctgcccactctgaggactccccagggagacacttctgccttggcccagactcctctcttcccttctccccacccgccaacccttcccccaactaccagctcagtatatacttctgtctctcctcctttccttgcttctcctcctccctcccatacgcatgcagcctggggcctggggcccaggaaagccactcctctcatgggtcacactgagaagtccttcctccacctgcatccacatggcagggcataactctaaagcttaaaaagatccagcgatctcagtggaccacaatccaaagctaagtcagccaaccaacactcaagggcttaaatcaaggactttgggcaaaccctatagagtggaggaattagaaaaataatacaaataaaagacatggtcattattcctgggtatttacagatactttgtgcttcctgaaatgttttgcagaaatcacattctcctctcattgtgctacacagcttgtaagcaccaagacaagaaattctatgataaagcaaaaagaaaagaaaagaaaaaatcctcttctactttcttcttggtgtgaattttttcttgtcaatttctgataatctatcaagcctacttaaaatagtgcctgcttatgcagtatggttaggatgatgaacacacacttaaacaggatagggaataagtacaaactacaagtgctgtggggatgcagagtaataggacaagtggtgaaaattaaaacatttttggcttaatcaaggagtacttcctggaggaggggagacctgatttggaaggagaggtgatataaacttgaaaagaaagttccagatgtggaaacactggttttattctttatttttattttgagacaggatcgtactctgtcacccaggttggagtgcagtggcatgatcttggctcactgcaacctccacttcccaggttcaaattatcctctgcctcagcctcctgagtagctgggactacaggcatgtgccaccatacccagctaattattttgcttttttttgtagagatggggttttgccatattgcttcagctggtcttgaactcctggactcaggtgattcccctgctgccttggcctcctaaaatgcttggattatagacgtgagccaccacacctggctaacaccggttctaaaattaggcagaatctctattttacttcaggttgaggagcagataatcttggctatattttccctggcaatacaataagacgaaagaagccttgtgcaatagcaggaagaattcagggtagacagtggggtcttggctaatgctggagactaaagtgaatggagagagaccctgaagcacctttctcccatacttggctatgggctatgggagggatgcctggactctgagacttggccaccatgttgtgttttgccattagaagatttggacatgaagttgaataaggcaggaacgacgtcatagcatcaaccacaacccccaatgtggctggagaaggagggagagagggcaaagaatatcttcctcttactcagattataagtggagaaactgaagtccattcactcaaatcggtaagtgtctactgagcacctcctatgtggcaagcactatataggccctaaggatccagagatgatcagggcatggtccctgtcaacatggtgctcacagtctagtgggaaatagagttcacttgtcattctatcattcaatcaaaaacaaaaagtattgagcacttactctgagccaggcagagttgcaggtgctggagatgcaactgtgaacaagacagactcaatccctgccccatcagagagtaccacctggtgcagaagatacatacataaacaggcagctataattcagggtgatgtatgctatgaaggctaaaggacagttgccatggggtggcatatccatagatatgccatagatccataggttcccatgaggggatctatccaagtctgtgaaaggggatgcgaggatgatgtggaagaagcaacaccaaatctgatctgctcacaaggtgcacagaagtcaggagtgggatggcatggggagggtgtcctgggcctagagtttgtgttccttttcagcatcttactaggagcttgtggccaaatcaggcccaggcggagcttcttccctctagtcacaggatagcactggcctgcaccaacacagcccttccaacaccagcaggggaaaccagatgataatcctaacagagccagaccaaggaatggggttatcagttttcctttttctgctgggaagtttctgccttggagctaggctacgtgggcggaggctgggaggtgggagggcactgtggaggatcttactctttccaccctcctctcactgatcctagttttgaacaagaaacaggtgatctgtttcgctagttgcagctgaatagaaaccaggacaagaaagtgttgtcctccccagacacgtttctgtctcctgggtcctaaccagctgcctacttgagccatctgacttcaatccacagggcctcccaggagctgaatccagaatggcaagaacaaagtagcaaagcaggaaagggcattcaagaagagaacagcatgggcaaaggccgcaaggccagagcacttggaaactgcaagtccctcagtgtagagatgagtctgtagaggaggttgacacaagcttgtgaaagacccagtatgccaggctaagggggtgggaacagtgagggacactgagggttttatggcttaaattttgacaagtgtatctacaatatagacaactaatgtaacactcctttttttttttttttttttttgagatggagtctcactctgtcgcccaggctagagtgcagtggtgagatcttggctcattgcaacctgcacttcctgggttcaagtgattctcctgtcttagcctcctgagtagctgggactacagactgatcccaccacatctggctaattttttgtatttttggtagagacagggtttcgccatgttggccaggctggtctcgaactcctcagctcaagtgatccacctgcctcagcctcccaaagttctgggattacagggaacacttttttttaaatttttttttttgagacagagtcttgctttatcatccaggttggagtgaagtggctcagtcatagctcactgcaaccttgacctcccgtactcaagcaatccttctgcctcagcctcctgagttgctgttaattttttttttttttttgtagagacagggtctcactatgctgcccaggctagtctcaaatttcaagagaccaaggcgggaggatggctgggctcaagagatcctcctgtcttggcttctcaaagtgctgggattataggcatgagtcactgcctatccatataaagtaacactcttgaacccactatccagacttgaggtttttttaagttactgttaaaattttgtcaattttgctcttgagttttcaaaataaagaggtcattacagataaagctgaagttccctttgtcccttccccagtaccattcccctccctttcagaggcaccaccatcatatattttttctatttttaccatagatatatatccattaataacattctaaggcttccgtgcattttaaaaagaggtccaatggttatgatataattaataactttagttttccatcgcacatttttaaaaaagtctttatttgaggttttcagcaaagtgctgacaagggtaaaactagcgttataagatcatgctggttaccaagtggagtattccaggtgacagaggaggaccaaggatggtgacagtgggaaggaggagacagagctaaaaggagactccacaccacaggtcactggtgatcgccctgtgagggcagggttgttttatacatgctgttcttcagcaccatgaacagggcctggctgttgaagatgcccaataaatatctgttgacagagaaaggttgacaggggcagacggatccaggatgactcccaaattcctggcccagtgcaaaagcctggatgatgatcccagtctgcagtatgagggccccaggaggagaagctggattgcagggaaagatgaatccagaagccatctctctgatctagaggaaatgaggctgtgccgtgtggaagggattaatgttaggaaacagaccagacatccgttcttaggacagaaaaaaatcttgtagcaggtagttcaaggctataaaagatctgaagggacccagagatggtaaaagtggaaaggttcagtcctgctgggggcaaagggatagttgaaaaacaagccaaaaacaataatcactttccttagaaggccaggagggcagggcccagcttctgcatcagccacaatgagtgtcttatagccctctgtgtggtgggtacccacagcccattagccaaggcagaggaggaggaggaaggtatagtaagtgcatctaggatcataaagaccttgtcagatgcccacactcaactttgctcccactccatattcatcaacaagatggaaaagtggggtgctcacagctgcttcttaggacctattcttgaccaaattcaatttctctattcagggaaggatgtgaaatataacctgctttcccaactcttaagacccagagctctggctcttcaccttaaaaggctgccctctgcaagagctccctcaaagtcactgccacccccacctcctcaccccaccacccctgccccaggcacagccaccacccaccctctgctgctaattcacctataaacagtctcctgccttgcatctccactcagttttgttgtttctctaacacgttccactcccctgacagcccgcccgatccttcctgttaccttagcactgacttcctaaatgaagtgcggtggctcacagttctgtcctctgtttttgtcactctttccagcccctcacttgagccttttgtagcttggtctcacaattctttgggtcctggctatggttaagtggcatttctctacttcatccctgggttcagggacagaaatgcttttaccatccccagtgcccctctctggggggagcagagaggtcactttagttttgtttggtctggtggagtaaggcacgcccttctctcagagagggagctgtcatggatctaaaccagtccctttcctaggagtacttgcaatttagacttgttctttagtcaaggaatgttaaatattgtaaagcaatgccgtagctggagggggagaatcttggaatcccctttccacgagcctgctatttgaaggagtggtgggatcccttggaagtgtgggccccttgtactctggatctaatccctagagtcaccaaagggccaacgtaatgattctcaaacaaatctgtgatcagtcccctcatatcttgaacttgggaaggctgctaatttttatcagagcaatacaccctgtagataccacctccctgaactctaacctgagcagagctctaaaccatcaaagaatcaggctatatagacttcccccttaaatgggtgtagattcaacaagattccaaaggtcacgtgacttgcctgactaatcagcgttcttcctcagtggggaaactacttgggccttttttccttctccttttcacctacctgaattattacatttatttataattaacatatattgcatgtaatattaaaaaaaataaaacttagaaagacttggtggtgggtgctgctgaattaggtatcagagccccagttaggtgggtgtcctgtggagtttctgatgaatcaaaagccattgttgggcactttaaaaacatggacgccttgagccctgggcagccccaaggctgtgactaccgagggcacccacagaggattagaactggggcactggaacgagaggatcatcagaagcaaggcctggatgctcaaattcccaccacagtcataaaacttaagagcatctaagtcgcaagcagcttttagtttctttcttaagaatccaactaatcttgtgttccaccttgtagccttctataaagtgtgaccattcacttggttgatgattaatgattcagctagtaattattaaacagaaaggaaccagaaataagaatcataaatttaaacacaacatttcatgttcttaatgctaaacttgaaggtaaaacagtaggaaggtagaaaaaacaatgttgctatttgttttgttcttttaaagaatgaagaagtcagatttcctggtccttgtgtaggctctgttcctgacagggtttctcaaacttttctgccaaagtccctttgatattagaggcaggagggtaaacttgggccccagcactctgggggcttgccctgaagggccattagcaaggaccaattatttctttttttttaaagacatgtttaattaaataataggttacttcatcttcattatttgcattatataaaaataggattttttattaataagaaaatagcagattctttttgtggccttaagttttagctctaaaatgatgcaaactttgcattttataacatagtatattttatacaacttaatgtaaaaatgatattttaaaccatctgccatcaaaaaacctctgtggccctcggagaggcttcttatatatccggggacaccctcagcgtgcagctactgcagtgtggcctggggcacttgcacccaggtgagaggtgctacggagtgtggtggtttgttaaactagctgccactgtcccaggttgtatctttaataactactatttagtgagcactaatatgtgccagactctacgtcaaatacttttatatgcttatgccatttaaattctcacaaccacctgcctaaggccacagagctgtaaggtggcagagtggggattcaaacacctgtctgcttggtttcaaagccaactgtgaccccctgctgactcttagaggccaaggctgaagcccgtggctgagtgagtggtggtgacctggggaaagaactgttgtggtgcaactggaaagagtgtggggggtgttccgaaggtagtgccttatctcaattgattgttcacagtcagttacagatcaaactccttgttctgctccttcccccttctcactactgcatttgaccagtctttaaaaaaaaatacatacaatgcaggtctaataagagaagggtcagaaaagctaggcttaggtctagctctgactttgactagctatatgttcttcagggaggccctcagccctgtctataaatgggactataaaggtctgtgaaaggggcaatggaaaaaagatgaatgttgagccacatctcaggctcctttcttgctccactgcttatcagctgtgtcatcttaggcacatcactacgactttaagtctgtttcctcacgtctaaaatgtgaagaacaatacccacctcacagggctgctgtggggatgaaaaataatacacatgaaacacctgaaacagagtttacatatagtagttgtgcaataaatgcttcccaatagtagttatccttgtaatagtggtattagccatactactaaagtattattatataaagtagtattagcaatgctactaaagtgttcatattttaaaattgtgattattaaagtgagaaaaatgtatgaaaggaatactacaaattaaggtaatccattaaaaataaggagctggaggctaggcatggtggcccacacctgtaatcccagcactttgggaggccaaggtgggtggatcacctgaggtcaggagttcgaggccagcctgaccaacatggagaaaccccgtctctactaaaaacacacaaaattagccaggtgtggtggcgggcgcctgtagtcccagctacttaggaggccgaggcaggagaatggcatgaacctgggaggcggagctttcagtgagtggagattttgtcactgcactccagcctgggcgacagggcgaggctccatctgaaaaaaaaaaaaaaaaaaaaaagagctggaggaggcccaccttaatgtacgccaaaatagttctgctggttgaaggcctggagttccctgcaacgggtggggaaggggattagcccggggaaataatgcctggggcaagttgaagcagagttagggaagatccaggtccctctgctgagggacagtttggaggacagagcctgaccctccatgaagagagactctcaaggtctcttttagctttaacattggctaagtgtgattctatgactcaaccagtctgccctaattcctcagtgtgggcaggacatgaaagaccacccaccagtatctcagtgagtttgtgtggcccccaccttggcagccacacacagacacttcccagagtctcagtgatgacaattctctctaaagggaacccaagccttaaccaaagaccacctctccatcttactgctggggcctttcaggtcagcctagagggagttttccagagcaggtggcttcctgagtggccaagatcatgtgggcaggataggttctcttctcgctgggcctttcccccctaagctggtgtcccaggcacctctctcagtgtggaaatcagattctttatggtttatttttgacaccagatcatcgctgcccaagtttcatcaatttgtcactctttttattgtcagcaattgcccataactggagcacatttaaaatgtcattgatcttggtattacagtgtcataatctgacagtaatagttgtagtcagcacaggaagccaaggccctgaaattgatggtgcacagcacaccaattatattctgtccatctaagtgataaaagagtatgtaggaggcattcaatagataaattagatatcactcccaattatgtcctttattttatggagtcatatgctccccttagaactttttttcttcatttggcttgtaaaggggaattacttgacccccctaaagactgggactgcctcccctgcctgtcccaacttgggttctatcctgatcccttccgactggctcatagtctttcacctgggctttctctgggactcacctaggagttccccagtgtggtaggtccacaggtgtaaagggaaggaggcagaggtgcttcaccatttgggaaggagttgggtcaggcctttgggaaatcctaggaagtctggcaatgcctttaatgtgacactgcccaaacaaatgagaccgggagaggggctggaaaatgggtaaaaattctccagtccagacaacagagccttcaaattaggacaacgagtaattggctatgactggggaggaagaggatggtaaaaaggttttcagtcctgaagaagtgaattcatccacccctctacctccactccagactgggtggggccaattcaagcccttcctcggaagaactcccggaatcttccacatccccattctgatccatatcagatgacttcctcagctcaagtcctagctctaccactgtggtagggacataatgccagctttcctaggggagacagagggctcctgtttgagaaaaagccccaagaatggttcatttccaagaagagagctcacctgaggccgggaagtgcttggccaaggaatagaggtacagtgaaggaataactttattggagacctggtttataagcatcttaaactctgaggacagccttgacctggtccagacccctgtttccccatcccccaaagccagcaggaaacacggcagaggccgagacaccaagtagtaaacagtgatctaggtccattgatcgagctttcaaagagaaagtgtccatgggttgggctgctccccattgccctgttgccatctcaatgttataaataattctggcactaagtgtcctgttacacggagaggaagtagatcttatggcgtgaaacctgagaatatgggtcatgggaagaggggtgactgggggcaggggtagagatggggagcgatcaccccaaggctcctcaactacacccctaggctggtgatagatgaatttctggagcagaggatggcatttcaagtgaaatgtttataggaaatgagtatgatttaaacaacgtcttgggtgataagcaccagccagctggggggagatggcaggctagaagtggaggaatcaaaagcccagaggcccccagtgttaagtagctgtctgaagctcaactcaaacacacacaccagctttggtctcaacatgtttttaacagctggttatgatttccttgaggtggctcagattaagactagagtggagcccccagctaagcaccttcaataactgtccatcacatcctctttagaaacagcagcctcttccccttggctcagggaccctgtaactgggaagggctgtgaagctgcatggcttgtcagcctgttcccaagtagcacggggcctgtctgtcctttgcctggggtcctgccccagatcccaggaacagagattgagccccacccacagagagctctcagtcttcaagaagagagaaaacatacaacctagaaaagaagagaggaagcaaagagatcaaaaggatggaagacaaggaagaggaaactgccaccaaatccagaatttgggcctttctcaccacatgcactgctgccatcctggtccaagccacacatttctcacttggattagtgcaatgacctttcaacaagtctccctgcatcttcccttggccccctgtgatctattctcaacacaaaagacaaaaagactatttaaaaactgaagtccaggccaggtgcagtggcttacgactgtaatcccagcactttgggaggccaaggtgggtggatcatgaggtcaggagttcaagaccagcctggctaagatggtgaaaccccgtctctactaaaactacaaaaattagctgggcatggtggcaggtgcctgtaatcccagctacatgggaggctgaggcataagaatcacttgaacctgggtggcagaagttgtagtgagtcaagattgtggcactgcactctagcttggttgacagggtgagactgtctctcaaaacaaaacaagaccctgaagtccaatcatgtctttcctctctacttcactccgagtaaaaagcaaagtccttaagttgacttatgaggccgaacatcatctgtttcctccttacctctctgatgccatctcctcccactcttgctcactcccacagacttgccaggcatgttcctgcctcagagccttagcaccagccactccctctacttggaatactcttgccaagatgtctatggggcttacttcctctctcacctctaagtctttgttcaaataccatattctcagtgagatttccttgacaaccatattaaaaacctcagatttcccctccatgctgatctttctgtatgtgatctattccttttctgtaacaattatcattttctaatatatgatataatttacttatttagtaagaatattgttcattatctttctctctctgctagaatgtaaactccacataggtgggggttctttctctgttttgattaccaatgtattctaagaacttggaatagtgctcaataataattgcttagtgtgtaaatgcaaaggatgaggttcaccaggggagggtttggagaagagaccagaggggaggccatcccaggcttggggtaaacttgtgccttatctcacaacaggccatgtgtgaggatctgagagtcagatcgttgggcacaagttcaagagtcgggctaggccatcacctaaaatggagagattcagttaacaaagagactaggctggatttacctccggaatctggtggaggacttggcttttggttgggattttaccatcttcatgaccaaagcatacttggggataataatgccaaagggatgtgcagggcaagaatgaggtggttgggaatggaggcacactgggaattcaggtgggggagggtagctgaaagaacaggcatgtgtcttctaagtctggaaaaaagattgaggtggaattagagggcctgaaggaaattgtgtatgcaagtgggaggaagagcctgggtccctggaagctatcatctccaagagcatgttccatctccactgacggcagaatcaaaagcgatgggctgcgcctaaagtcaaaggaactagagtgagacatcaagaaaggcctcccaataatatgacaggtggtggaggggaagcactgggccttgttctctggaaaacttgagcaggacctaactgggtgcatacctgagccaggctaacccagagggcactgtgaggctctggagtgggagtgtggtactagagcccctgagagggttcctgcctctgcctgactttgaactccatcctctcacctgtgaggcttctgagcttctaagcatgcagaaatgtcctctctcctgacctcaagtttctgcatcttttcagagtggaaactgagagtatttagtattccaaggtcccaccagtccaggggccaaaacatgtgtaccacctctcctcagaatatcattgctcaactcagttttgtggtggcctcagggtacaagccaggagaagcagaaaatacctttggaggttatacaattcagtggttactgcagttataatggagtgaggacatgggtggcctgggagttctgaggttccggggagatttacttgtcactgtataacttttggtgccttttgagttttgaaccatgtacatgtatttcctattcaaaaaacataaaacaattaaaatcagaggaaagcaacaacaataataacaacaaagaataggtctagggaagtgggaacttgatgcctccaattgctaccctgaaggcaatgacctgcctcctcttgcccatgtgtaccttcctccacatctggcatctccattctctagaggctcagagaggggtgtggctggcctgatgtcacccagcatttaagactagcaaaattctggggcttagcagtccagactctcagtgttgtctttcttttctgatcctcaatgaccccgtctactcattgaccactccatgtttttggcagaactttacatatgctacaaatcaaccttcaatgggttattgttaaaactgtgtgatcttaaatgccatcttttccaggaagtaatctcttttcacaaagagaaagagatggcagctctcctctccccctggtgtggtgtctgatggttcattctctcccttcctgcctccctcctccctaccaccctctaccactaaagtggctctccactgaaacttggccctgtctctgatgagatatgtgaccttgagcaagtcatttaacctttctgtgtgtctgtttcttcatctaaaattgaggatcctgaccttccttccatggctcttcacttatgcatttgtacagcaagcatgtattctgtgcctggtgctgaacctggcagtgaggatcacacaagacaatgtatgtgaagttaacacagagacacagagagttaccgccaaggcgtccttccttggatgctgttctgcgctgggtgctccaaccccctcatctggcacgcccttggaggaactgcttcacagtctactccaaacctcttaacttctagcattgctcctgggctgaagccgatatcctgctctgcatgaagggtcagggggtgcagaaatagcctatttcccaggctttttcatttggttagatccttaggcaccactttgcctacaagaaggaataatgctgaaatctgtctgttggtctttagtctggaattttcagtgtccacctctcttgccctctgtgggcctttccctgggagttgggctggaacaaggggtaggaaacggattctattcgtgtcctcgctctgctcatttctctcctttcctgaatcccatgcatccatggagattggtacagtggctaagattctgggattggaaactcacatttgtctccctccaaatgtaagctgagctgtggaggaaagatggtcccttctttaaaatgaacaccaccatctcagagtatacaggagcctgcttcaagcagaggaggcagagctgccttccagagctcttggcaggaagctgtccccactccctgcctgaccactgaggattggacgagcgtcactgggagggaggggtgtttgtagaaaaaacgtgctgcttcagccctggtcattgctgatggaccatgacagcaaggaaggtcaagtccagactaaggaggtacttctggttgtcagggactgggtttaaggtgagaggttggttggaactactcagacatggtcttcccagagcaaggaggaaggatgagatgatctgggagttgtgaaggactcaggggtttcatgatgctgcagagctggcagtgactgggaggatgccagggagatgtcagttcacccatgtctagagcagaaatcccatggtcagagaccaggtatctggaaccccaacattcccagcataatgcctcgcacaaggctaactggaaactgaggaagacaagtccttccctggaagacggtgacaacactgtgctcacagaaggacagctactttaaagccccagcaagaaaatggtcccagactgtgggacctggaagtacttcttcatgtccagcctcaatcctccttaccacagctcgattggatctcagtgcaacctgtgggatttgtccatgcccagaggagaaacccagcaaggaatatggactttgcttttaggcctaccctgttggctgtgggagataaaacaatgagaaaggaagtgcagatgacatgaaacacagcctagattgccaggcaaaagccagacacagctgcctgtttctcatcctacaggagtcatgcagctgtcctttagaagtgggagaacaagttatcttgatggtggatataatcgaaatttatgattccaaaagtatcacaactgcccagtaattaaaatttgacagtgtttataagaaaacactcatgcaatggattcccatgagaatcgtcctccatgaactgggaaacttttagtgtggaagactttgagccagacccagaaaaatcccagattcatgaggaacatggaagtcagactgagccagacttaggaaactctaggcccacaaggaacatgggagtcaggaaaagaggaggccagtgtggaggccacatccaacccaccatcagtccatctcacttcattgtggctccgggaatggaagctcaattctggagctggccagaagggccccagtttgcaatccaacttttccctgcacgattgagtcatcccacctgggcaccaggccatgctgttgactgtgcaatgaagggaatgaggggatgcagttggaagcaacttctgtgtcatctgtctgcaccttttttgcaggtgaaggtgcgagatcccatccacacttcaacagactgtatcctcacccctatctgaccttatcgttgctcacactctgcatcccagaataaaattctgagacaatggaggagtgcctccctgatgacctgaagcacctgctcagctacaaaccaaaacgaggtaaattcaagaagccctgcgactggactgctggggtctggccctgggttggccacagaacaataaagcatggggagttgtctgttttggggtgtggtgtgtttctcttctttgtagaaatgtggctttttggcaaggggaggtgattttgaacctggcagttgtcagccattcttccaaatcactgtggattcaggagccatggaaaaacaaagaacatggagaccttcagcccaagcagagccacagagacaggccactggaagatggggtgacaaaaacagtgctgcagtgtattagccaaatttctttcagcagactccacttacctccacacacagacacacacacacacacaaactcacatgaccgcagccacacacatatccacaacttgaaacactcccacagaaacacacatcccagcagcttcagaggctgtgtgtttctgcaggaagctcctctttggagagagcagcctggggaacacaggtggactctacctagatatcacggagaggggcacatttcaaaaagactcacccccacaccctccaggcaggcccgttcgggccatcttcatggtcaggtcccactggaggaggaggcacttggagactgtgatgtggggcactggaaactgttcctctgattcctttccccaaagaggctgtgtgcaagaattgggtcccatgggggaagggaatacagtctgctgagatgttaaggggtgtccaggtgatgaaatcataccgaagaccccagaggcagatgtcagcagaaaatggcagggcccttgagctcactgcctctcttcatcctgggcctcacaggggctcctgctactcaacatggctctctgggaaaggcaggaactatgacaaaggcaagttgaaggtgaagcagaagtctcacactttgaacagacctcacgagtgcagatgcagttcagagagtgtctcagtcgccgtctgaggcaattgcaagccaaaaaaagtgtgtttaggagcgctgatgaagagtagtatggactcctcatgaaagcaatggaaaatcaattcttgccttggagaatgagagggcctgtgctagcatccaagccatgttcaaggattcctgccagaggacccaaaagcctcctgcaaacaccccaatcccccacagtgagaccactactcacaacctggagtgcagccagcctacccgaagtactttttactccctgaaatccctggcagccaaaagatctgtagagagaggcagtcccccgtagcaacagatcaataaaagatcccctccacagtgaaaaagaacatgtagatgactgtaacagagcctagatgaccaggcaaatcctgacaccgctgcctgcttctcatcctataggaatcatgcagccctctgataagagtgggagaacaagagtttccttgttggcagatatggtgaaaatgctttgctatgtgtggattttcttttcacagttaaaactttgttttgattcagaaggataaagacactttttttgtgtccctatgagggaaaatttcaaaatccattgaggcctatagtggaaacaccaaatatcccacgattaaaaactacaaagaagctatgtctgaaaatgctttccaatgtgtgattttatctcacagagttaaacatttcttgtgattcagtaggctggaaactctccttttctggaatctaagaggggatattacagagcaaattgaggcctatagtaagaaactgactatcctgtgataaaaactggaaacaaactatcagtgaaatgctttgtgatgtctggatttatctcacaaagctaaatctttgttttaattcagcagtttagaaacactttcactgtaggatctgcaaagggacattttggagcccactgatgcctatagagaaaaatggaatatcccgtgatgaaaacttaatgcaagctatctgtcaaaaggctttgcgaggcatggaattatctcacagagccaactttttgttttgattcagcatgttggaaacatgtttttttgtagaatctaagatgagacattttgaagcacattgaggcctggagtttaaaaccaaatatcctgcgataaaaactagaaacaagctatctgtgaaaatgctttgtgatctgtgaaataatgtcacacagttaaacctttgttttaattcaacaatttggaaacactctttctgtagaatctacaaagggacatttcggagcgcatggaggtctatagtgaaaaacagaatatctcatgataaaaactaggagtaagctatgtgcgaaaatgctttaggatgtgtgggctcatctcaaagagttatacctttctgttgattcatcaggttgaaaacagtctttttgtagtatctaccaataaacttttcaaagcccattgaggcctacagtgaaaaacagaatatcctgcggaaaaaaactagaagtttgctatctgtgaacatgctttgtgatgtgtcgattcatcttacaaatttaaacctttcttttgattccataggttggaaacactctttttgttgaatctaaaaagaaaaaatgtcagagctcattggggcctatagtaaaacaaacaaataaacaaacacaaaaaacaaatattacacgatgaaaactaaaaacaagctatcagtgaaaatgttttgtgatgtgtggattcttctcacagagttaaactttttttatttagcattttggaaacactctttttgtagaatctttggagggacatttcggagccctttgaggcatacagtgaaaaactgaatatcccatgatagaaactagaaataaggtatcagtgaaaatggtttgtgatgtgttgattcatctcctagagttaaatctttgattcaacaggttgaaaacacttttattgtagaatctatgaagagcattttcaaagacctttgaggcccataatgaaaaatcaattatcctgtgataaaaactagaaagaagatatctgtccaaatgctttgcaatgtttggattcatctcacagagttaaaccactgttttaattcagcaatttggaaacactctttttgttgaatctacgaatgggaatttctgagacctttgaggcatattgtaaaaaagcgaatatccctcacacacaaaactagaaaacagctatctgtgagaacgactggcagtgtctggattcatctcacagagttaaatatttgttatcattcagcaggctagaaacacgttttttgtaaatctaaggaaagacattttgaacccctgaggcctatagtgagaaacagaatatcccatgataaaaactacaaacaagttatctgcgaaaatgctttgtgatatgtgaaataatgtcacatatttaaaactttgttttaattcagcagtttggaaacactgtttttgtagattctacataaaaacatttcagagcccattgaggcctatagtgaaagaccaaatatcccatgaaagaaactagaagcaagctatctgtgaaaaagatttgcaatgtgtggatccaactcacagagttaaaactttcttctgattcggcagaatctgaacattcagttcaatcagaatttaaacactccttttctagaatgtacgaagaaacatttcagagcccattgaaacctatagtgaaaaccctaatatctcatgataaaaaatggaaacaacctatctgtaaaaatgctttgggatgtgtggattcatcttccagagttaaatatttgttttgattcagcagaatggaaacactctttatgtagaatttatgaagggccatttcagagcccattgagacctgcagtgaaagatcaaatatctccccccacccaaaaaaaaaaaaaaacaagaaaaaagctatctgtgaaaatgctttgccattgtggattcatgccacagagttaaaccagtgttttaaatatgcaggttggaaacattctttttgcagaatctacaaagaaatatttcaaagcccattgaagcctatagtgaaaaacaaaacatgtggagaaaaaaactacaaacaagctatctgtgaaaatgctttccaatgtgtggattcatatcatggagttaaacctttcttttgattaagcaggttgaaagcagtctgtttttagaatctatgagaagacattttagtgcccattgagtcctatggtgaaaaactgaatatcctgtgataaaaataagaaacaggctatctgtgaaaatgctttgcaatgcatagatttaactccacagagttaaacctttgttttgatttagctggttggaaacactctttttgtggaatctacaaagggacaatatggagcccctggagaagtatttggaaaaagcgagtatcctacaatgaaaagtagaaagaagatatctgtgaaaatgttttgcaatgtgtggatctatctcacagagttaaacctttgttttgattcagcaggctggaaaccctctttttgcagattgtacaaaaggacattacaaagctcattgagacctatagtgaaaagttaaatatcccacagtgaaaactagaaacaagctatctgtgaaaaggtcttgtgatttggggaatcatctctcagagttcaacatatgttattttttcagcatgttgaaaacactatttttgtagaatatatgaagggacatttcggagcccatggagaagtacattaaaacactgaatatcctgcaataaaaactacaaaccagctatctgtgaaaatgctttgcattgtgtggattccttccacagaatcaaacatttgttttgattcagcaggttggaaacactctttttgtagaatctactaagggccatttcagagtccattgaggactactacagtgaaagaccgaatatcccatgataaaaactagaaacaagctatctgtgaaaatgctttgcagtgtgcagattcatctcaaagagttaaacaactgttttaatttggcagactttaaaatctctttttgcacaatctacgaagaaacatttcaaaacccattgaaacctacagtgaaaaacaaaatacgaggagatataaactacaaacaagctatctgtgaaaatcctttgggatgtgtgtattcacatcacagagttaaacctttgttttgattaagcaagttggaaacagtcagtttgtagaatctaggagaagacattttggtgcccattgaggcctatagtgaaaaatgaaatatcccacaataaaaacaaaacaaacaaacaaacaaaaccaagctatctgtgaaaatattttgctatgtgtggattcacctcactgagttaaatctttattttgattcagcactttgaaaaccctctttttgtacaatctgtgagagtcatttgggagcctattgaggtctatagtgaaaaaccaagtatctcatgataaaagctagaaactagcaatctgtgaaagtgctttgcaatgtatggatatatctcacagatttaaacacttattttgattcagtaggtcggaaacactctttttgtaaaatctacatagggacatttcagagtacatgaaagacattagtgaaaaactgaaaatcccatgacaaaaactagtaaaaatctatctgtgaaaatactttgtgatgtgtcaattcatatcacagagttaaaccttgttttaattcagcaggttgaaacactgtttttgtagaaactaaaatggcaaatttcagagaaaattaaggcctaaagttaaaaatgttatatctcaagataaaaactagaaacaagctatatatgagaatgctttgtgatgtgtggattcaactcacagggttaaacctttgtttttattcagcaggttgtaaatgctttctttgtagtctatgaagggacatttcagagtccatcaagaagtatatgaaaaaactgaacatcctgcaatgaaaactagacacaagctatctgtgaaaattccttcctatgtgtggattcctctcacagtataaaacctttgtttttattcagcagaccaaaatcattctttttgtagaatgtacaaagggacattttggagcccattgtgccctgtcatgaaaaactgagtatcacgtgataaaaactagaaacaagccaactgtgaaaatgttttatgatctgttattttatgtcacagagttaaacctttgtttttattcagcaggttgaaaacactctttttgtagactctatgaggggacatttcagagcctattgaggtctccagtgaaaaatcaaatatcccgtgataaaaaccagaaacaagctatctgtgaaaatgctttgagatgtgtagatttatagatttatctcacagaattaaaggtttgatttatcaggttgcaacactctatttgtagaatctacgaggggacatttcagagaccattgaggcctacactgaaaaaactgaatatcccatgataaaaatcagatataagctattagtaaaaatgctttgcaatgtgtggacttatctcacaaagttaaaccattgttttgatttagcaggtgagaaacactctatgtagaatctaagaagacacatttcagagcccattgaggcctaaagtaaaacatcaaatatcccacaataaaaaatagaaacaagctatattggaaaatgatttgtgatgtgtagattcatttcagagaattaaacctttgctttgattgagcaggattgaagcactctttttgtagaatctacaaagggacactttgaagcccattgaggcctatagtcaaaaaccaattatcccatgataaaaactagaaaaaagccatcagtgaaaatgccttgtgatgtgtggatttctcccacagagttatacctttgtcttgattcagtcagttggatacagtcttttcatagaatctatgaagggacatttcagagcccatggaggaatatattgaaaaactgaatatctcgtgacgtaaagtaaaaacaagttatttgtgaaaatgttttgtgatgtgtcgattcatctcacagtgttaagcctttatttttatacagcattttggaaacactcttttagtagaatctaagaggggacatttctgagcactttgaggcctattgtaaaatatacaatattctgcgatcaaaagtagaaacaagctatctgtgaaaatgcttgcaatgtgtggattcacctcaaagagttaaagttttgttttggttcagcaggttagaaacattctttttgtagaacctacaaagggcatttctgagcccagtgaagactatagtgaaaaaccgaatattccacgataaaaactagaaaaaaaatctgtgaaaatgctttgcgatatttgaatttatctcacaacattaaatatttgttttgattcaacagtttggaaactgcttttttttttgtacaatttatgaggatgtatttcaaagcccattgaggcttatagtgaaaaaccgaatattctgagataaaaactatatgaagctgtctctgaaaatgatttatgattggtgatttcatctcacagaattaaaccattcttttgactcagcaggatggaaacactcttttggtaaaatcttcaataggacatttcagagcaaattgatgcctacagtgaaaaaccgaatatccagcaataatgtgcagattcatcttacaaagttaaacctttattttgcttcagatgcttgaaaactcactgtttgtagaatctatgagggtataatttgaagccaatataagcctgtagtgaaaaaccaatatcgcacaataaaagtaaaaaaagctattggccaggtgtggtggctcacgcctgtaatcccaggactttgggaggctgaggcaggcagatcacaaggtcaggagatcgagaccatcctggctaacatggtgaaaccccgtctctactgaaaacacaaaaaattggccaggcctggtggcgggcacctgtagtcccagctacttgggaggctgaggcaggagaatggcgtgaacccaggaagccgagatcaggccactgcactccagcctgggtgactgagtgagactctatctaaaaaaaaaaaaaaaaaaaaaaaaaaaactacctgtgaaaatactttgtgatgtgtggatttatctcaaaaagttaaacgttgttttgattcagcaggttaaaacactctttttgtgaaatctacagaggaatctttcaaagcccattgaagcctatagtgaaaaatcaatatcccgagataaaaactagaaacaagctatcagggaaaatgctttgcaatgtgaagatttatctcacagagataaacctttatttacatacagcaggttgggggacactctttttgtagaattaagaagttacaattaagcctccattgaagcctatagtgaaaaacccaatatccagtgatgaaccctagaaacaagctatttgtgaaaattctttgtgatgtgtgatttcatatcaaagagttaaacctttatttttgttcagaaaaatgaaaaactttttttgtagaatctgcaaagagacatttctgagaccattgaggccaatagtaaagaatcaaatgtctcatcataaaagctagaaacaagctatttgtgtgctttccaatgtgtagattcatttcacagagttaaacctttgcttttatacagggaattgggcacacttttatagaacctatgaatggacatttcagagttcattgaggcctatactgaaaaaccaaatatcctgtgataaaaattaggaaaaaactgtctgtgaaaatgctttgtgaggtttggagtcatctcacagatttaagctgtagttttgattcagcaggtaggaaacacttgtttttgaaaatctactatgagacatttctgagcccgatgaggcatatagtgaaaaaccgaatatcatgctttaaaactagaaacaagtgatctgaaatatgctttgtgatgtgtggattcctctaaaagagtacacatttgctttgattcagcannnnnnnnnnnnnnnnnnnnnnnnnnnnnnnnnnnnnnnnnnnnnnnnnnnnnnnnnnnnnnnnnnnnnnnnnnnnnnnnnnnnnnnnnnnnntccccagagtgtgatgttccccttcctgtgtccaggtgttctcattgttcaattcccacctatgagtgagaatatgcggtgtttgtttttttgtcttgcgatagtttactgagaatgatgatttccaatttcatccatgtccctacaaaggacatgaactgggtatatacccaaaggactacaaatcatgctgctataaagacacatgcacatgtatgtttattgcggcactattcacaatagaaaagacatggaaccaacccaaatatccaacagtgatagactagattaagaaaatgtggcacatatacaccatggaatactatgcagccataaaacactcttgttattaatctacaaagggatattttggagtgcttgaggccttttgtgaaaaaccaaatatcccacaataaaaattagaaacaagccatctgtgaagatgctttgtgatgcctggatttatctcacagagttaaaccttcctttttattccataggttggaaacactcattttgtacaatctacaaagggacatttcagagctcgttgaggctaatattggaaaatctaatatcctgtgataaatactataaagaagctgtttctgaaaatactttgtgatgtgtgattttatgtcaaaagttgaacttttcttttgattcatcagtttggaaactgtttttgtagaatctacaaggggagatttcataacccattgaagcacacagtgaaaaatcaaatatctcttgataaaaactcaaagcaacctatctgtaaaaatgttttgcaatgggtagattcatcttacaaagttaaacctgtgttttccttcagcaggttggaaactctttggttgttcaatctacaaggcaacaattcatagtccattgaggcatttagtgaaaaaccaataatccatggtaaaaattagaaaaaagctatgggtgaaaatgctttgagatgtgtggtttcatctcacaaagttaaaactttgttttgattcaacaggttggaaacactctttttgtagaatctacaaagggacatttcagagcccattgatgcttacagtgaaaaaccaaataccccaggataaaaactagaaacaggctatctgtgaaaaagctttgcatatcatctcacagaattgaacatttgttttgattcagcaggttggaaatattctttttgtagaatctacaaggggaactttgggagcaaattgaggcctatagcatgaaatcgaatattctgcaataaaaactagagaaaatctatctataaaaatggtttgtgatgtgtgggttcatctcacaaagttaaatctttgttttcattcagcatgttggaaacccctttttatagaacttatgagggggcatttcatcgcccatggaggcctatagtgaaaaactgaatattatatgatagaaactatagaagctatatgtgaaaatgctttgcaatttacggtttcatctcatacagcttaaactttcttttgattcagctaagttggaaacactctttttgtagaatgtatgaagggacattttggatcccactgaggcctatagtgaaaagctgaataattcatgataaaaactagaagaaagctatctgtgaaattgctttgcaatgtggggatttatttcacagagttaaacttttgtttctacacagtaggttcaaaactctcttttagtagaagctaagaggggacaatttagagccctttgaggcttatagggaacaattcaaagttttgtgattaaaaactagatagaaactatctgtaaaaatgtttggtgatgtgaaaattcatctcacagtgttaaacatttgttttgattcagtacgttggcaaaaatttttgtagactgtacaaagggacattttggagaccactgagaccaatattgaaaaaatgaacatcttgctataaaactagaaaagttcttggtgaaaacgctttctgatgtgtgaattcatctcacagatgtaaacctttgttttcattcagccagttggaaacacgctttttatagagttcaggaggggatatttcagagcccattgaagcctctatttgaatactgaatattcctagtgacatatggtgttgagcatcttttcagaggtctaagaaatgtgccaggtatggtgacacacgcttgtggtcccagctactcaggaagctgaggtgggagggttacttgagccctggaggttggggctgcattgagccatgattgtaccactgcactccagcctgagtgacagagctaaaacctgtctaaaaagataaataagacctggtgcgatggctcatgccagtaatctaagcactttgggagggcaagttgggtggatcatgaggtcagcagattaagaccatcctggctaacacggtgaaaccccatctctactaaaaatacaaaaaattaaccgggtatggtgggacgtgcctgtaattccagctactcaggaggctgaggcagcagaatcacttgaacctgggaggcagaggttgcagtaagccaagatcgtgctgttgcactccaacctgggcaacagagtgagactccatctcaaaaaataaattaaaaaataataattaacaaataaataattgacttaatttttagaacagttgtaggtgtacagaaaaatagaccagaaaggatattgatctctaatatctgcctcacaccacagtacatacactttctctattatcatgttgttagtgtggtacatttgttaagcttgatgagccaacattgatattattaagttcatggcttatattaagattcactctttgtgttctaccatttatgggctttgacaaatgcttaagcaatatatccaccattatagggtcacacagaaaagtttcactgccctaaaaatcttctgtgttcgacctagtcatccttccctctgctcaagcctctggcaaccactgaactttttataatgccatctgcctagttttgccttttctagtattccatataattggaactctacactatgtggcctttttgcattggcttctctcacttagaaatatgtgtttaagattcctccatgtcttgtcatgccttggtagttcatttctttttattcctgaagaatattccattgtatgaatgtttcacagttagtttatctgtttccctattgtaggatatcttggttacttccaatctttgttggttatgtataagctgctataaacattcatgtgcagaatttgagtggatataagttttcaagtcagttgagtatataccaaagaatgcaattgccagatcatatggtaagcatatgtttagttctgcaggaatttgcaaaactgccttccacagtggctttaccattttgcattcccagaagcgatcaatgagagttcctgttgttccatatcctcagcagcatttggtggtctcagtgtttggatttgagccagtctaatagatgtgtagtggtatctcatcattgttttaatttgaattccctagtgacatatggtgttaagcatcttttcagatgcttatttttgctatctatatagcaaagggcagatacaaatggtggactgcagggaaagagcttgctatgatgataggaagctgcaggcagagatgatctcagggttaactgggcatcaactgtgccttctcctgtcacataaaatgtgatctacctgagttttgactggaagcacagaatatctggttgttcataaatatttcttactgaagcttgaggtttatgtatgttatgatcaaaagatgatatcaccccaatatataagcaggttggggtacaacagggaatgattgtcacagatgttgagagtctacattgaatggatggtgtcactggcttcccatatatttctcattatggactttaacttttcatttgccacatgaaaggccactgagataagctaaatcatatttttctcttggggatctctgttactgagaaatttttgcattctgggctacactgggttcataatctgactatatatatatcgtgtgtatgtttgttccctccctaaaatgctcagttcagctgcaggtctagagacaaatactactaggtttccattttagagagttgaagatctgaggtctggagaagttagtgtgtagaaagttatatttaacaagtggcaagaccatgtggccaggtcagataagctgccttcagattttactcttaaacttctactggataatgtctttttttaatagaaaagaaaagagtgaacttagattttttttcaaaatcatggactgtaagagttctttcaagatatgatggaaagcaataattgtcccattttacattacctataattattgctcaccagaaattgattatcgatgcagcaaccttttacattcctcactgctttactatgcatgagggggcttcactgtaaataagaggtccaagattcagaaatatctttaacttgcaatgcttggtcacatgtatccatctgaaaaatattttgctcattagccatatggagtcatatggcagactacagccagagacacaaaatgtggaaagaagaaagggctatcagaagtcccgtgtctccttacattttgtatttctattcatatgcatctagaatcataaggaatttgagcaaatgggaaatgcaaagtcctaatcaaagcatacccacatttcagttatctgcattattgcacatttaaatttataatgcatacataggatacaattcaataggtataaaaatgttaagtaaccttttctctcatgcaccccagtcactcagtagctcactttacagtcaacattttaattttgttgggcatactttcataaattttctctctatctgtctctgtctctgtctctctctctctctctctctctctctctctctctctctctctatatatatatatatatatatatatatatatatacacattttttttttgaggtggagtctcggcctgtcacccaggctggagtgcaatggtgagatctcatctcactgcaacatctgcctcctatgttcaagcaattcaactgcctgagtagctaagattacagtgtgtgccaccacactcggctaattttttgtgtgtgtttttagtggagacggggtttcaccgtgttggccaaactcctgacctcgtgatccgcccgcctcagcctcccaaagttttgggattaccagtgtgaactaccacacctgggcatttttttctctttaaaataaattttattgtatatatttaagctacacatatggtgttatagaatacatatacatagtaaaaattcattactatagtgaagcaaattaccatatctatcacagatacacacattttttcttgtggcaagggaaggtaaaatcttatttagcatgaatcccatatacagtacaattttattacctatagtcctcatgttgtatatagatgtataggattgttcatctgacatatctgctactgtgtatctctgacccacatgtccttatttcctcccttcctctctacctgataactactctgttgttctctatttttattttttttaggcagagtctcactgtgttacctcccaaaagtgctgagattataggcgtgagccaccgcacttggttgctttcaccatttcagatagaacttggagaagaacctgaggaaaaacatgactttaaaatttggatgaatggagaaatctctttccattcaccttcctttcctctatttcattcttattgtgaaatatgcaaacaaagatagggatacatcagttattaaataaacatctgtgtgatacctatccaggtgaagaactagagcactatcaccaccaagaagtcctctgtttgcccctaactgatcctaaagtcttccttcccttgttagtaacagatataacagatacccacattacctgtggatgtctgcgtttctctccttggttctctttataattttattatttatttttttctttcttttcttttcttttcttttcttttttttttttttttttagagatggagccttgctctgtcacccaggctggagtgtagtggcatgatcttgactcattgcaacctccaactcccggattcaagtgattctcatgcctaaacctcccgaatagctgggattacaggcatgggctatatgccaccacgcctggctaatttttgtatttttagtagagacggggttttacatgttggtcaggctggtctcgaactcctgacctcagtgcctggccttattatgcattttttagaagcctaaagtcaagtctggttttgcctggtttttctcttacataattggagtaaaagtctgtatcctgctgcctctggctccttttacccaatattaagtatttaatatttacacttagcattgtttctgcattctattaaaacagtacaccagccaggcacgatggctcatgtctataatcccagcactttgggaggccgaggcaggcagatcacttgagttcaggagttccagaccaccctagccaacatggtgaaaccccatctctactaaaactacaaaaattaggccatgcagtggctaatgcctgtcatctcagcactttgagaggccgaggcaggcagatcatgaggtcaggagatcgagaccatgctggcgaacatggtgaaaccaaatctctactaaaaatacaaaaaaattagctgggcgtggtggcatgtgcctgtagtcccagctactcaggaggctgaggctgaagaatcacttgaatctgggaggtggaggttgcagtgagccgagtttgcaccactgcactccagcctgggtgacagaactagactctgttaaaaaaaaaaaaaaaaaaaaaggccgggcgtggtggtgggtgcctgtaatcccaattactcgggaggctgaggcaggagaatcagttgaacttgggaggtggtggaggttgcagtgagccaagattacaccctgtactccaacctggacaacagagtgagactcagtatcaaaaaaaaaaaaaaaaaaaaaaaaggctgggcgtggtggctcccacctgtaatcccagcactttgggaggctgagacaggtggattacctcaggtcaggagcttgagaccagccttaccaacaaggtggaaccctgtctctaccaataatacaaaaatttgctgggagtggcggcacccatcagtaagaccagctactcaggaggctgagacaggagaattacttgaacctgagaggcagagaatgcagtgagccgagatcgctccctttactccaacctggggtcctgagcaagaccccatcttaaaaataaaaataaaaataaaaataaaaataaaaatacagtacaccagtgtgtaacccttcattgttggtagacatgtgggttgtgttcatttttgccagttacaaatgatgctgttgtgaacatttgtgtatttctatttgtttaccattagtgtgtatagtgtgtatagtgaacagtataaaacaagaggtgaaaccataggttacaggggaaacatatcttccattttactagctattattggtttcatcccaatgttaacacaccaactgacagtcttacaatgtctgatacttcccaaatcttcgcattcttcttgatacttaattttgtcaaaattttaatttgagtcttttggtgggtatgtggaaatgattgtgatattaatttactaggccttttcttctctgtaactagccctgtcaagatatatgtgtggtgtgggaggggtaggagcccccagaggtagcatgggctctggaaaccttaatcattctatgtgaaaaacttggtggggcagagattttttttttttttttttttttgagagagagttttgctcttgttgcccaagctggagtgcaatggcgtgatcgcagctcattgcaacctccgcctcccaggttcaagtgattctcctgcctcagcctcccaagtagttgggattagaggtatgtgccaccacaacaagctacttttttgtgtttagtagagatggggtttcaccatgtttgtcaggttggtgttgaactcctgacgtcaagtgatccacccacctcagcctcccaaagtgctcagattacaggcatgcaccactgcccctgccctgttttcattttattaattggctgattcattcacacacataattatcaagtcaaatctcactgtttccttagcatttatcttcagtttagcttagaaaatctattcctattttaaaacatatacaattatttgagtgtggtggcacatgcctgtaatcccagctacttgggaggctgaggcaggagtatcacttgaacctgggaaactgaggttgcagtcagtcaaaatcgccccactacactccagcctggatgacagagtgagactccatctcaaaaaaccaaacaagaaggttttctccagatcatttttacatttaattattcagtctgttttgactataccttaaagaattcagtaaatataacttcaatcctacacactattagtcaatgtacctaacacaatttattgaataaaccagtccattcccaacatcattctactaaaaatacaaaaaacagtaaccaggcaggtggcaggcacctgtagtcccagctactcaggatgctgaggcaggagaatggtgtgaacccaggaggtggagcttgcagtgaacctacatcacaccactgcactccagcctgggcaacagagcaagactccatctcaaaaaaaaaaaaaaagtaattatatttcccaacgtaaatgaatagagccattaaggaaaataacatggagattcatcagaaattaaaaatagaattactatatgttccagcaatcccacctgtgtgtgtatagcgaaaggaattgaaatcagcatactgaagagataactgcactaccatattcactgcagcattatccataatagctaagatatgaaagtaacctaggaggccagcataggatgaatggataaagaaaatatgatacacacacacacacacacacacacacacacacataaaggaacactatgcactcttcattttatttattttattttattttgagatgtagtttcgctcttgttgcccaggctggagtgcaatgttgtgatcatggctcactgcaacctccacctcctgggttcaagtgattctcctacctcatcctccccagcagctgggattacaggcatgcaccacgtagcctggctaattttctacttttagtagagatggggtttctccatgttggtcagggtggtctcgaactcctgacctcaggtgatctacccgcctcagcctcccaaagtgctaggattacagacatgagccaccatgcccgatcttactatttactctttttttttttcctttgagatggagtttccgtctttttgcccaggctgcagtgcaatggtgcgatctcagctcactgcaacctccgcctcctgggttcaaacgattctcctgtctcagcctcccaagtagatgggattacaggtgcccaccaccacacccaactaatttttgtatttttagtaaagagggggtttcacaatgttgctcaggcttgtctcgaacttctgagcttgagtgatccacccgtctcagcctctgaaagtgctggaattgcaggcatgagccacagcacccagccaaaaacacagattaatgtattaatagtctgaagtactgtaaaatactgctgagaatacagatcactaatatcatcatcatagagcacaaaacaagttctggtattattaagaaaatcatagctctgactaaaacatacatggaaaacacattctattagaaattaaattatactaatactattgacaatcacttttatagctgtcactgtaaactcaaagacaagaaataaattcatcaccagaaaatgtaaaacaagtgcttagccttactgctgagaagtctgtagttgccttttactgaacgacacctcagttcttgggataaagtttgaaacagcaactggaaggacagctttaactttaaaatggttttatttttagggttgtcatgttataaaagctattctcacatagctaagctgttggaaagagacaggttttgtgaaggtttttcatcaggtgtttcatgttgtcctcactgcaacctcaaacaatggcaaatgattcctaagccactgtaatgctaactcagctgattaataaaattctgtttctttaggccgggcacagtgtctcacacctgtaatcccagcattgtgggaggctgaggcgggtggatcacaaggtcaggagattgagaccatcgtggctaacacggtgaaaacttgtctctactaaaaattcaaaatattagctgggcgtggtggcacgtgtctgtaatcccagctacttgggaggctgaggcaggagaatcgcttgagcctgggaggcagagcttgcagtgagctgagattgtgtgactgcactccagcctgggtgacagagagagactccgtctcaaaataataatagtaataatgaataaataaataaaataaaaaataaaaagatggaagaaactcagactttcaaaaattaaggatcccatttttacctaagatattggctttactcttaggttccattgattgacttagaaaataattttttttctaactaactacacaagaaaaatgaaatgaaggggtagaactcaagaatctctgtgcatttctaaaagccaaattttgcaaccactgcaatattaccatttactaacattttctttcatctcagccaaaggtaagaggcctctaactgggacaggcatggtggctcacgtctgtaatcccagtaattcgggaggcctaggtgggtagatcacttgaggtcaggagttcaagatgagcctggccaacatggtgaaacggcgtctcaactaaaaatacaaaacttagctgggtatggtggtgggcacctgtaatcccagctccttgggaggctgaggcaggagaatttcttgaacccaggaggcagaggttgcagtgagcctagatcatgcccctctactccagcctgggtgacagagcaagattccatctcaaaaaaaaaaaaaaaaagagagagagagagaggcctccagctggatccaagtcagttaattaccagatcaaatctgatcctggacctagttcagtttctgtcctaactttcaaactgtttggatcacaaatttgttcagagaaactcagagaattccaaacacaaatccatggagttctgaaatctgagagaacttacccatgatccccagccactttgagagatcaagggacaaaagtaggtccttgcaggtaccttgcttgttcactcaacagtcctggggattgttaaggctctacttcagatcccacttctgacagcatctgttaaaagaagaacttcagctgaattaaatttaaagaagttcaattcagctatcaacaattcatgaatagggcagtccctgaaatcacagcagattcagagagatttcagcacagccacgtggtgaaagatttatagccataaaaagggaaatgaggtacagaaattggaggtgaggtacagaaacaagtgaattggttacagcttagcatttgccttagttgaatagagtttgaacactcagtagtgtaagagtggttgaagtatggctgctgggattggccaacactcagctattgttacaggtgcatactcctaagttaggtttttcaaccttgtctacctattaagttacgttgcagtttgtccacaaagattcaaatatagaagtatggagtccttctcaggccatatttagtgtgttttaacactctaaaatgtataaaatcaacctgaaccccaaccaccttgggaacattttctcagggtctcctgaggagggctgtgtcacaggccatggtcactcatatttcactcagaataaatctcttcaaatattttacagagtttgactcttttactcaacactgttcagtaacaaaagagaacaaaccatcaagacacacagcaacagacaaatttcaaaaactttacactgagtgaaagaaggtagacccaaagattacatgtgctatggtttcatttatatgaagttcaagaactggcagaactaaattatggtgatagaaaccaaatcaccagttgccttgtgttgcagcaatactgactggaaaggggcatgagagaagtttatgaggtgaaagaaatgttttgtgttcagattaagatgtgtgtcacaggggtttatacctttaatatgtgtatatttcactctatacatttaattcctcataaaataaaataaaataaaataaaactgaagagaagtaaataagagtacaatgtctttatgctactccaaagagaaggtttgcctccaaaagagaagcccgagaggtttgctttgagctgtaacaaaaataaggtttctgaagaaagaagagatatcagacaaaaagtgatttctctaggaattaaaaaagaagcagaaatagataaagaaaaattgttcttgtgaatttagtgcacagcaaagtattattgtttttagtgccgagtctcttttcccctaaaacctggatatgctgtattctttaagcaaatttcaagaaagaagtgaaaaatctcataggaagagagaaaggaaaatcactctttgaatatacactaaaacctgaatgtacaaatggtatgtatcagtgtaccagggaaaatgcacaatatacttaagttgtttaatttgaatagaatataataaaagagcaatttaaaagctgtggatagtgtatagataaaccaaaagggataattctgtatgtaccctgcaactgttaccttctctaggcctgaagggatgaagggcagtattagttattgaaacttggagacaaaaatgccatgtggagataaccaccttcaagacagtgatccaggacattggtgagagataaaagcatatggcttagagaaggaagttatagaaagaagattattagtggagacaagacaagtcagtggggaaggaaaatgttgaaaacaaagagcagggaagaggacaatagtatgtttgatgagtccagtcaggcactggggacagggaagtgggtgtgattttgttttatttaacaacaaaatagatagagaaatgaaaggcaatgaagtgcacatgaataacctggtttctactgtgggcagctagggttcagtcatgctggagactgtgaaagatgtagaacacacctttataatcggccacctgaagaatgaaggagccgtgtacatagtaatttcctgattttatctatggaataaaggttgtactaatagcaaaacccaccgttaattttccaccatcctaataccttgagcccttaacttcctggcatttcttgtctgctaggaagaatactcagagaatggcctcaggctgagagatgttgagatagaaagctctttagaatataagagaaccgtcaactgaagttgcaggtgatttccagagcagcctttagaggtaggagtgaagaatgcatagcttctgttacagatagtaatcaagatacacagactcttctgtggacttctaaggtgcgggagttgataacttctgaaagcaaagaaaaatggcataaaaataaaacagaatgtgataaggaatgactagaggataggctgtaggaaagaaggagaaagaggaaaggtcagtttaggttcagttatttaagaaaatctctttgaggagtaggaatttgaaaccagttctgcagaaacctgggggtagaacattccaaacagagtaaaatagaagaacaaagactcagaggcaggctcaatcttggcaataggctcaaccatcagacaaaaaaaaaaaaaaaagcggaataatgaggagatacagaatgatcagagatgaaatgggagaggggttcagattacatgaattttataggacttggtgatttagattttattccagtatgttgagaatccacagatcattttaagcaaaaaaaaaaaaaaatggcatgatctcatttatattttagaagtcagttgggtttctctgtataatatggatttttatggggcaagaaggaagggagttgttacaggtacttgagaagaaagatgatgtttgcttgactaggtcggtagcaatagagatgggaaaaagcaagcagatgagactcacttttggatctttagttcacctaacgtgttgatacattggagcataaaagataaatactttacttttcatccttaaaaggcagaaaaatatagaggcaaaaaatggaaagttggaagtttaggaaatgtggtttccgacttgaccttaaactgttccagctgtatatgatctcagggcgatcatgcagctgttttggctgtggcttcttcatttctgaaatggcattaataataacattcctgtagctgaggtgttaaagaataaaactatagaggtaaagcagtcttgaaaatttcaatgtaatacctaaatttaaggtattatagggatgccctaagttgcttttaaaaaatgctatgttattacatgctactctttgataaacttttatttgtgataattaatgtaattagtgtgctaactttctacagtggcaccctggggcaatcgtgcaacagttgtaattttaaaagttgggcaaataagtaaatgtcaatctgtaataaaatccaaatgagtctttgatgaatgttgatggtgactggtaatttacctgataaaatattgtgactgcccagttaccttggaatagctgatttctcaaagtaattaccatgttctgcatagtgaagtgtcattagagaaaatcttaacacacagtgatcatttttaatttggtgatttaaatatcatactgattaatgaaatagtagcattttaattcagactgttaagtcagaagagagagacatgtttatcacatactatagagtgcactgttgtgtaataatcactcatttcttacctgtttttaactaccgtttaaaaaatatcattccttctaataaagataaagtcttattggattaaaagttaaaaagcaattggacccagtctcctacctagaaccttattgctgttaagtctaggacatctttgagaaaccatctttaccttgctgttttctgagagtcgtatgttatgatttcactagatctgcaaacaaacaacagagacatactactggtatggtattctaacatttgacatgacattgttcatcaaattattaacttttggttaactgtgtgtttctttgtttgctttgctttccaagaatatgtttcacagatactattagttcaagaaagctggggaaaagaaaaaataataaaggttaagatcctgactagggaatgaattagagaaagccaaagtaattgcctggaaaagatatgtgggaggttgggtcaagtttcaaggttcagaagtagacttcgagataagcatttttctggatatttggaattatctcctaaagatattattctttgaaatatgaccaaaaacatatagccaaacatcaattttgttttggcaaatccagtccaagaaaataagttatctaaaggctcagaagtgctttgtcctagttctttctcaggcttcttaatcaatactcagaactctgtaccaattattggtaagtaatatatatagattaccagagactgcagtttctgccagtgtgtctgaattaaccctttcagtgttttgtgaacttcagttgtaaaatattagcagaatataaaataattttaattttttaaaattttaaagtagggaaacatttgagcaaacacttcaccaaagaagatatgcaaatggccggtaagcatatgaaattatcaacattattattcactagaaaaatgtaaattaaatccacaatgagatgcccctacacatataaataaattggctaaaatttaaaacttatagacaactgaaagcatcaagtgatagtgaggatgtggaccacaaaactcgcagtttgctagcagggatgcaaaatgatacagcaactttggaaaacagtttggcagtttcttatcattttaaacattctcttacatacaacccagaaagtcctctattaagaatttacccccaaaaaagggagcaagggaagttcatgtaaatccctatatgcaaattattcacaataccttaaacctagaaacaactcaaatgtacatcaatcagctagtgataaacaaagttttctatatagagatagtaggttaatattagcaatttaaaaagaagaaacttaaaatccatgaaagaacataattttgcaaaagacatgaaaggcaatacactgtttcattccatttatatgatattctggtaaaggcaaaagtatagagacaaatcagatcagtggttgccagggtatataagtaggggttggagacttaatacaaaggaaattgagggaatttatgggggtgatgggagtattctgtatattgattgcagtggtagttatatgattatatacattaatcaataatgatcaaactgtatatctaagaagggtaaagtctaatgaatgtaatttatcaataatcatcaaactggatgtctaagaagagtaaattctaatgaatgtaaattatacatcaatacatgtgatttttttaaatttatttaaggatattatgaacaaattttggcaagaatttgaaaatttagaaaaaagtggacaaattccaagaaaaatactacttactaaagcagacactggaaaaaaacaaaatatgagtaatctgatttacattaatgaaattaaatatttaacatattcaattttggaatagtccatgccaggatttgcctgcaaattcttctaaagatttaataaaggaatagtaattcttttataacacttagagttctataacacttagtttctgtaattgcagaaaccctttccaacacactttatgatggccacattatcttgataagaactcttacagggcagtacatgaaagaaaaacacaatccaggcttcatatacaaattgaagtaaaaatcttatgcaaattttttaaacaaattcagtagcatattttaaaagtttaatgtagactaacaaacttcctttaattccagaaatgtaaggatgttttaacgttaaaaaatcaatgagtaaacttttttgattttgataattatactttggttatagggagatgtcctttttttagaaagtcaaattgattcatttgggggtatgtattaatccgttttcatgctgctgataaagataaacccaagactgggcaatttacaaaagaaaagaggtttaatagactcacagtcccatgtggctagggaagcctcacaatcacggcagaaggtgaaagctgtgtctctcatggtggcagacaagagaagagagcttgtgcagggaaattcccctgtataaaatcatcagatatttgagacttctttgctatcatgagaatagcatgggaaagacgtgcccccatgattcaattacctcttattgggtccctcccacacatgtgggaattcaagatgagatttgggtggggacacagcaaaaccctaacagggtagaagggcaaatttgacatattagtcttaaataattaaaaaaagagaagaatgagagaggaggaaaaatcataaataaatggagcaaaacataaacaactggtgaatctgaaaatctcagtaaaatactttgtggtttcttatacttttcttgcaactttcgtgtttgaaaggttatcctccttctgctcaaatttgccaaaaacatttaaaagtctattagtgcaatgtactactgaataaaaagaaaaaccagatgattgtctaaaatctctgataatagtattttttagaattgaaaacctcaacaaactgtagcattttaattgataaacataatcttaaaaaaaaatctgcagcaaaatccttcataatgtgaaatgttaaacattttgtccgcaagataaaatatgaggctagattacttattatcattactccatcccactttattctaatccattcatagccagtgcaagatggcaaggagtaaagactaaagaccagaaaggtaaaatgccactcccattttcatactatacatttgtgtttatgaaatgtccaagataattttctacttattagaattaatatcacagttttgtgtggtttctgatacaagatcaatattttaaaaagtgtatttctttacacaataaatagaagattaaaatataaaaagatacccctttgaacagcatcaaaacatcaaatacttgagataaatttaattaaatatatgcaaaatctctacagaactatataactttattgagtaatattgaatgaaacctaaataaatcaagagatagaatgtgttcataaattgaaaacttaaatttataaagatgtccattttcctaaattcatctgttgattacaatatcaatcatagttccaagaggcttctttatcttcaaaaattgacatgtgaattctagaatttaggtgacaatgcaaaaggctaagaacagctaacatctcaaaaaagaacaaagtacttacagtcccagatatcaaggctataatataaaccatagtaatgaagaaaggtaaatatcacaagcatagatagacaaatagtatagaatcttgtatcggtatggaaaaagaaatctagatttttacctcacctcattcacaaaaccatttcattcatgcagatctaaacaggaatggaaaagcaataattgtataagataataaagaatatcttcagggcctgggaagacaaaggtttcttaagcaggatatgaaaaacattaatgatttcaactgtattaaaattaaaaagagttttcttctctaaaaaggcaccaataagagagcaaaagcaagtgaaactagattatttgtggtttatataattgacaaatggcttatatgcagaatacataaaaattcgaacaataagaagagagaccacccaataggaatatgggcgatattttgaaaaagcagtttacaaaagagattatacaaatatctaataaacgttttaaaggacgtccaacctcacttgtccttaaataataattaagtccatcgggagaaatactatacattcaccagaaaagttaaaagatagaaaataatttaaagtgttgatgtggttttgaagcaactggaaatctcttatgctatcaggatgaattttgaacaaccactttggaaacaagtttcatattatctacaacatttgaacacatgcgtcctatatgatccaagaatttcttttctgggtatgcattcaacagaattgtaagcacatatgcagtaatagaaacttataacaatgttcacaaatggattatttagccacagaaggaaagcaatgtctagcaagacaggaaagaataaatagtggtgtatgaatagattgtactactttacatctatcaaaatgaatatgataaagatacacacaataacatatgtgaatcttgatcataattttgaacaagaggaacaaatacaaacacattctgtattactctatttatagggggtaaattattctttgccatttgacatcaggagagtggttacattttgggagaagggagagggaaataatgtggttggggcatgaggagcctcctatgtgtcctttgagtgtttcttgacccaggttgatagtttcatgggtgtgttcactctgaactaattccttgagctatacaattacgatttgcacaattcaattatattatatttcagtggaagcttatgaaagagaaacattgctgctaaaattcattaagtgaaggcttatggggacgtagaccttcatagcatcccatacttgcaaaaggggcaatctaactgaaggatgacatcagtatcagatatcagatatcacacaaaccaatgatcacttttactgtctcaactgtgggtcaatctgacattacaaattttctgatgtagtacaacatgaggtacaaaatttcacctgtgatttattctagtcaagcgtgtttaactggcagccattaaggcattaggtgtaaatttagacacagaaagcaatcaagcaaagcctcaaggtatgccattttgtaggtcaattgtcctctttccttcaacaagtcagtaccatttaaaaaggggggtaattctagatttaaaaaaaaattaaggggtggacaattagatataatgtgcaggactgcactgagactggtttaaagaaatcagccataaagaaaaatgtttaactaattaaagacatctaaatacagcatggttattatatataatgaaaatgcatgaaaacaaaaatgtgaaaattattgactgaaaaagaggttacaaagtgtatatttgatgaaaaataatatgtaaggctagagtaaaaggtactaacaatagtgctttcttgtttataggactatttcaacacattttgctcctctgcatttaaaaacttttctctgatgcacatatactgtttctgtaataataaaattatgtttaaatgattcaacatttctgaatagcaaattactatatatgtatactttaaaatagacaatttatagggctatacccaacttgtggctgtgcactatccacttagtatacaggtacttcttacccttcttttaatatctaattataaaattctgaactcattgagggctattagcacatctacaattgtttatgcttcttctaagtttgatatttgtatggtatttttaaaattatatattatgaactttttgtatatatttgagtattttgatattttacctataaaaagtacaatgtttactgaacaaaataatagaataattatttttaaaaatgtagaaattaacaattgcaggcaatatcacttcccagaaataatttccagttttattacattgtcatcatggactaaattatacactatttttactttttggaatatgctaaggttttcattgaggcccaatactttgtccattttgactattattccatgagtatttgaataaatatacacatattagttatcttccattaattgcttatgtcctcctaaatctcacttatttttttcacttgatcttccatcagctgaaaaaatagtattataaattgtattttttaaaatgcttctgaagtttttgctttctgaattttgcatacatatttaataaatatttatgacagttacttatttatagtgacctttttattgatacaaagtgcctttgtccttcttcatattttttaccaaccatgaataaaacctatttgttctaaatattgtgatctttcctttttgttttaatttccatttgcctgtagttcttttgcccaaagcttcactttcaagcttttgagttaatttttattagagtttctgcttgtatgcaataaatcattggctttgttactgaatgtaatcctgtaaggaatcatgattcctctcagagttttcactgtcaagaacttaaagagtctgtttacggaggtgtagctagggttaaaaaaataagagagaaagagagatgcagaggaacaaagacaccaaccacaggaagccataaagggacaagagaaaagatagcattaccagagctaagtgagttctggagctacaaagaaaggtcacatagcagaagttctagttatggagagattcagcccctggcagaagcacagaaccaaagcagagggaatcggggaagaaataacccattctcctctccacctaacttgaaccctagagaagcctcccactgagtgccttctgctgaaattcaggcgacaaaggaatctggatgatgttgactgcatggctctgcatccatgagcacagagcaagttagacaagggaagaaaataaatccatgaagtcaataaaaacttaccagaacattactccgacttcgcattcattcttgcctcttgcttagattaagaaaattggatctccagtacagagagaccacagtcctagcataatttaaattgtggcagggtgtcagcaattcagtcttattcccaactggattataaatgttaatgtcacccactatcagtattctttatatgagatagcaaggagagtgaggggaaagaaatattcagttaatataaatatgtaaattagctactactattttcactttttgtcatgaggctaaattttatcatcataatttcctttttctattgtccattccattttcaagcaaactttactacttccatagtacaggaattattgtctcatgggatgacgcaaatcttcatttcataggatcgaagtccctagtgatactgtctttatttggtggctctttacgggacatataagtgctaaaagactccacagcagatctcctggattccaactaggcctacttgcctagttttcatttgttaatcagaattaatcaatccattcagtatagttaaactctttattgccagttaggtcaatggcattaggagctaaaaatagcaagggtgcaatttcaggtccaaatttaatggaaacatagctatatttcttgaaagaaatgttccttccttggaaaagagaacctccaaagctactaaatacaagtttccaggaagggaaataaaattctgtaaatcgaatattaggtaaaataattctacttcttagttcctgatcctacatattctggcttttggaaatatggcttatgtattggctaatagtttaatctgttaggccagcaccacaatttcaagcaatattttgtcacacctggcactgaaactgagcctttaggaagccattccatcattctatcaggccagctgcttactggtgatggaacatgtggggaaacatgaatttcatgggcatggatcttttgtaacaattgttttgctataaaatgagtttccttgtcaaaggcaatgtagtatgggatgttatggcaatgaataaggcattctataaggtgacatatggtgacactggtagaagcattgaaagcagaggagagaaacccatttctagaatgtgtatttggttttatgtggacaaatgattgcttactccacaatataaaggattcaatgtaatcactctggcaccaggagcctggtcggtgtccctatgaaatggtgccatatcaggaacacattggcccttggtattgacaagttggacactcaatgatagtagacagatcagggttgctaaagggtagtccattgtgttgagttcatgcatatttaccacccatgcatctatgattactttttgcatggttccactaggtaagcaccagtatcactgggagaaagcttgatagacatccacaggaaagatcagacacctaatctacctgattgttgagcaccttctctttaggggattcccctgttgaatatgaatgagagttgaggaaaatttgataactaagcaggaatagctaataaaggtctgaactacctgctcattcaatatacttgtgactccccttcctgttcagccttaatgtcacccatatcaattccattttataataacctgctaattttcaagcacagttttaagatttgataacttggatagcacccggttgatagttaacacttcaaatcacatagttacctggtgacaagccagacttcttcaatagataaaaatatttggcagaaggggacatagttttgttccaaaattattagttaggtgaactatgattgtcttcttggggttacttggaagcctcaaacagcattactctaagccagatacttagatctactgagtcaaaatacacacgcagcagaggagcctacagcacagactgaacctgctgcaaagagctattttttctaaatgtgtagacttgtgagttagcctgtaataggtttgaatacacataactgtagtcatgttacttccaaaatccagagaagcctctcagtcactctgttctttctgtgtggtaggcagtacaaggtatagttacctgttattccctaagaaacagatattcttacataccccattttgtaatagcttctacattaattaggacccttgtataaaacagaaatctgcttcaggcttggtatgggggctcacacctctaatcccagcattttgggaggccaaggtgggagatcacgtgagcctaggagttcaagaccatcctgggcaacatagggagaccccatcactattattaaaaaagaaagaaagaaaagaaaaataaatctgcttcaaagatccacaatagagactttgttgaacggactacttacctcagttagagcaggatttaaaaccccaggaaaggttgctgtagtactcagataccaggaacagtgaaatgctgttaccatccccagacctgaagggacaaggtgtataatttgcattattgaagcctagaaagagctggtgctgtggagaagagttatctggtagaaactacattcacgcagaattaggaagaaagcagggtatagatatcaggatttatctctctctccttcaaccatctgacccactgccagtgccttacattaatccaattcaactaggagctagctggcagaggaacctgaatgataaagtcttaggagttcacctcctggagcacagaacagagtactgaaagtcagataaaggatttgtgtggagctaacagaattatcaacacatttttcttgtccaatataagtcttttgctttaattattaattttatttcattacatataacagtgaagatatgtttagtttgagttttgtcatcttatgtaatgatctctgctttgaatgttttattttttcacatttttctataatatgttctttgtgtatatgtttgcatttgcctttcataagattttgtatgtttgtgtatatgtatcagttatgatgatacacagcagaaaaaaaattttaatatctgcaaatatatataaagtagagatgcaccaaatagatatttggctgaacaccgaaaggctgagtatcaacgtcattattcacctgaagctgaatattactattgtagaatgaatccaaagttttatgaaattcaattttgagtgcaatatttgttactgaaatttcagtaatcaaaaatttaaagcttgatattattcaaggacagtaatttcttgtcattgtcagctacaagattgttcctgtggtcatcatagcatgggcagatgctaatttgtctaccttcctatatcatacataggaggaagttcccaccaaattattacactttcttccactataatattaaaaaataaagtatatatatgaagattgtggattctgaaaatgtagttgatggtgactatggagcttcattgaagcaataccccagcaactgcagctttgcacactgactatttttagaagcagaattagaattgatgctttgaaatacatatttttatgcttctattttcctgcacttgttccataatcacttgagaatatttctctataaaccttaacttttaaatgtggcaatggaaaagtgaaaatagctcttaagataaagcaattgtctctgaattttcagctgcatctaaactttcatgatgaagctaatttcagtaggttctccagtttaggatgacaggaagagctttaccacaggtatcttataagaaatatgtgcactctaatggcatattgtatggtgatttcatcaacaaattatagcaaacaaactaatttatctctaagcaaccactggatcttaataagtcctgagatggaagctgtgccattaaggtttgttcaagcagctactttaatatttaatctgccaatttaccttgtataggttcataacaaagcagttccaaaattgtatgcctgtcatgtagtatatctttagctgaagattttaagatttcaccaaggttaattaacccttggaagtaaatactcagatattaaaaataaatctaaaggatcatgaggtcattgataacatataagcttagagatgccagaaatgtgggtggattagatcagttttctaatctgaactcccaaaatatgagggaaaactaaaggtgaatggagaattgggctgatccagagggtaaacatgcacatacgtgagtgcaaatgtgtgcttgcatgagatatgtgccctccgtggccctgagaaagtagcggcagagatagacttctcagggaaacctgggcactgtccctgcctttacacatttgtcaggtatattggctcatgggctcattctctttatcagagaaagattacagatttctgatataaacaccaaaagatcaggtgatatattattgaaagttcactgcctattttaatctgagtaatataaaataataatggtatatggatggtctgatggcaatattagtttcttctactaggtagggaaggaggtgtctttctctttttgtgaatttgggcctttgttgtaaatcgggagttgacatatttctggaacataagggaaaacaacatccaaccagaatctaaccttttaatccatccaagagtttacttaattcacccaattaaaatatggattctctacaatacctattcataatctctttagtccatattttctccattatgtccaactcccaccattcagctgttgttttattgtgagagctatttttaagattgtagaattaattacttaaaacatgtactccctaactctacaggctcataaagttcatgttcacctctgcattccagtgatcagaaaaaatatggggcatatttccaaatataactccttcactgtctcttttcaaaggacataacagagtgatagaattgaaggaagagggcagataatttaaaaatattatatagggggccacctcttgaaaaggaaatctaatatcctacaggaaggctctggccctaggttttcatctgtaaatcatagttactctaactcttatagttactctaactcttctagttactagagggaaaattttctttattcatcttgctgtgttgttcatcttggaaagggaaagtaaaagctttgtaataacacctaagataataatagcctcacagattactatgatcatacaggacagtatgtttcatagttttacatttcttaaaatcttgtccacaaacagaaaatatttgatgtaaagagtagaaaccaatctaagaagaagagcaaagaaaagcaactaaagatgcttaccttgaaagaaagaggacttaaggcaacattagttgttttcaaatatttgaggtggtggatacaagttttaggatggcatatgtaaactactctaaggaattaataattactagcatacatggattgctttaagggatgggggacacaaacagcagggtcaaaacaaagtcttatggtcaggaatactgtagagaaaatacggccattgaatagggagttagactaattaagctatatagaccttttcaattgtgattaaaattgtgtgagttatatgaaattgtatgagatagtactgatatttaaggattattgtattattttcctatttgtcaggctaacaaaagtgaaggcaatgcatgataaatgtggtatagtgatgattagtagatttagagttgcaaacacggagcttgaactcagaattcagttctatcactgacattagtaaactagaataaataattaacttatatgagactcaattcatttattaaacataatgataattatactatatacctcacaaaattattatgtgagttaaattaggtagcatgtattcagtacaatgaacccttagaaatggcctaatatgtgcacttgtaattgtgacaagctgagtcacaaagagaggaaagtggcagttgcggcctaaaattttgctgggtttttatgacacatacagagatagctataattcaacagggtaaatgctataacagaggtgaatttaaaagtatcttatgaacaaatgaagttgggaaaggttgattttggagatgaattagaaaaacatgcaaaaaagaagtgccataaatcttgcaagacaaacagtatttaggaagtatgtaaaaatataccagaaatagtcagcatgcatagatattgaataaaaatctgcctaagccctctctctgaaaaaaaataaaataaaatataagcccttcatggggaacaacaaatagtaaaagctgacttgactatgtatttgaacacacttggtacggtacatggaaggtagcaggtacacaatatgtgcttttttaaaaaacagagtgtttgacttctggttctggccataataaaataatggatttcagactgaatcttctgctgtaaacaactataaaactagacaaaatgtaccatgtgcccattttaaagcattgtacaacacacagcatagagtcgtgatccttgaagtgaactccacatttaaagctggccttttatatagggatacttccaaaactgcaggaaagcaaagaggagcccaaatagatcacagcaatttttctgaatggagaaaccaattgtaggatgcagctgaggtggctggaatttatgaagaacattccagagaagaaagagtagaactgagaaagagatctaaaaatctacaaatgagtcttcttgaattttttgagtgaacaacatattatgcatgtacagagtaagatttcacaaggccacacagagaactgtttctaaggggccatgagcggaatgaggatttcactggttcaacaatgttgaaagccattagagtttcaaccagtcaaagtgaaaggactcactgagcatctcccagggtttaaataagaactcagaaaagtcagcttccaaagtagggctcatctactcctatcagaagaaatactcttaaatcagccttaaaaacttaaaaataagcaccaactggatcaaactaatgtgccagtaaattaactgtctgctcaaaataaaattcaacacacttctaccaaagacggaagtctagaatctaaataatatagtatgaaaaatgtcaaatataaaacaaaaacaattattaaacatgcaaaaatagcagaaacctatgagaaaattaggagaaaaataagcaatagaaacagacctaagatagccaggatgttgttaagaatgaaaacaagcattattaagctggtattaaaatatgtccaaggatttagaggaaaagaagaaaaacagtggagagatgtagaatatcaacacagtcatacaattcaaaattcgtaattgtaggcgggcaaaaaggcatgtaatagaaaagggaataatgataaaaatacttctgacttctcttcagaacaaatgtaagctaaatgaaaatctaaaaattatttaaagtatagagaagaaataataagtcgtttcagaattatatatacagtgaaaataatcttcaaaaggcaaaattaacactttaataaggttaaaataataggtgaaagaatatattacctccagaaaagcactacaagaaatgttgaagcatgcttttcaagcacaagagtagtgataaaaaatataaattcacatctaccaaagatgtggagtgctactggggcacaaggacagataggttttccttaagggacaatgacaacaacaaagaatctaaagtttcaacaggaaaacacataatttttctcatcctgagatgatagttttaatatcccgatttagtaattgtcgtatctgattatctttgtcagaaaaactaacatatacaagttttttaagcccaaaatatgaagtctttttatcacttcattgagtcacgagctgctatggttaccaagagaaaagatttttggagcccaaagacttctcaggcttatttttctctccatttcttacttctgtgcctttaaagatattacaaaggaatttaagagcacccattgtagggcaaaagtgaagaaaaaaattaactgtgggtatgttatgatcaattgcttgtattagttatgaagccaggtatctaagaatgtccttatccaaacaactgtatttagcataaaaaatactggaaaagtggcttatcaatttcaaaaacttatctctgcaaatattatataatggaatttgttttccagtatcttatatagcaatgtcatcaagtttgtaaactggataatctgctaattattttatgagaatggcagaagtcatttaaagtagccacattcaactctgagtgtatatgtgcatatgcccatcaaaatacaagcagggctcaataggtagtttatgtttgtgggcaggtaatcttaaaaaatatttacctaaaaaacaacagcccttcatgctaaaaactctcaataaattaggtattaatgggacatatctcaaaataataagagctatttatgacaaacccacacccaatatcatactgaatgggcaaaaactgggtgcattccctttgaaaactggcagaagacagggatgccctctctcaccactccttttcaacatagtcttggaagttctggccagggcaatcagaaaggagaaggaaataaagggtattcaattaggaaaagaggaagtcaaattgtccctgtttgcaaatgacatgattgtatatctagaaaaccccattgtctcagcccaaaatctccttaagctgctaagcaatttcagcaaagtctcaggatacaaaatcaatgtgcaaaaatcacaagcattcttatacaccaataacaatcagagagccaaatcatgagtgaaatcccattcacaattgcttcaaagaaaataaaatacctaggaatccaacttacaagggatgtgaaggacccttcaaggagaactataaaccacttctcaatgaaataaaagaggatacaaacaaatggaagaacatgccatgctcatgggtaggaagaatcaatatcgtgaaaatgtctatactgcccaaggtaattcatagattcaatgccatctccatcaagctgacaatgactttcatcacagaattggaaaaaactaatttaaagttcatatggaaccaaaaaagagcccgcatcaccaagtcaatcctaagccaaaacaataaagctggagacatcacgctacctgacttcaaactatactacaaggctacagtaaccaaaacagcatggtactggtaccaaaacagagatatagaccaacggaacagaacagagccctcaaaaataatgacacacatctacaaccatctgatctttgacaaatctgacaaaaacaagcaatggggaaatgattccctatttaataaatggtgctgggaaaactggctagccatatgtagaaagctgaaactggatcccttccttacaccttatacaaaaattaattcaagatggattaaatacttaaatgtcagactaaaaccataaaaaccctagaagaaaacctaggcattacaattcaggacataggcatgggcaaggacttcatgtctaaaacaccaaaagcaatggcaacaaaagacaaaattaacaaatgggatctaattgaacaaaagagcttctgcacagcaaaagaaactaccatcagaatgaacaggcaacatacagaatgggaaaaaaatttggaacctactcatctgacaaagggcttatatccagaatctacaaagaactcaaacaaatttacaaggaaaaaaaactaacaaccttatcaacaagtggacaaaggatatgaactgacacttctcaaaagaagacatttatgcagccaaaagacacatgaaaaaatgctcatcatcactggccatcagagaaattcaaatcaaaaccacaatcagataccatctcacaccagttagaatggtgatcattaaaaagtcatgcaacaacaggtgctggagaggatatggagaaataggaacacttgtacactgttggtggaactgtaaactagttcaaccattgtggaagtcagtgtggtgattcctcagagatctagaacaagaaacaccatttgacccagccatcccattactggatagatacccaaaggattataaatcatgctgctataaagacacatgctaaagacacgtatgtttattgcagcactattcacaatagcaaagacttggaactaagccaaatgtccaacaatgatagactggattaagaaaatgtggcacatatacaccatggaatactatgcagccataaaaaatgataagttcatgtcctttctagggacatggatgaagctttaaaccatcattctcagccaactatcacaaggacaaaaaaccaaacaccatatgttctcactcgtaggtgggaattgaacaatgagaacacttggacacaggaatgggaacatcccacaccagggcttatcgtggggtagcggggaggggggagggatagcattaggaggtatacctaatgcaaatgatgagttaatgggggaagcacaccaacatggcacatgaatacatatgtaacaaacctgtacgttgtgcacatgtaccctaaaatttaaataaaaaatatatttacctaaaaatcaatatgactgcttaaataaataaattgcaaattattctaagaatacatgattatgaaatattttcaagcctaacagaaataaagataacagtataattattcttgataaccccaagctgaagagaactcaaaggcccgcaaaattggaaaatgggttgtaaaagctgtgatatagtcaaataattggaaactactcaaaagtactacaaaaaaagacaccaaaagtatgtattgtatgatcacatccatataaagtttcagaatgggcaagatcaatctgtagtgatagaaacaagaataatggctggagggtgacgggaattgattattaagtggcatgagaaatttctgaggtaatgtcaatgttctatgggctgtgagtggctctatcatgtatttttatcaaaagtcattgaataatgatttaaaaattgtgcatttcatcttatctaaagtataccaaaattaaaaacaaggaaaaaatgctatcaaaaagtatggaaaagtaaactttcgcacattagtctcaaaaaccaatgatttctgatattctttttactctatcaatgtttttcattttgaatcatctaggtttttctgtattactgtacttcagctcagagactgaatacttaacaaaatgcagagtatgaatttcagtgaagtaatggccaaaaaattggccataaacagattattgtgagattagtatttgtggtatgcacagtagcctcccaaagatgtccacatcctcattcctggaatctgtgaatatggcaaaatggactttgtagctgtaactaaggttacaaactttaagatagggcaagcatctttaagtatccaggtgaacccaatctaatcatatgacccctcaaaagcagagaacatacttcagctggagaaagagaggcttggcagagggaaggttcggaggcgtcattgctggttttgcgatgtagaggctcacataggaagtctggagacaggttactaggagctgacaccagcaaccaccagttgacacaggcaagaaaacaatgacgtataactgtacaagatactgggaatggtgatacaactgcaaacaactaaattctgccaacaaccttaataaatctggaaatgtactcttaccagagcttcccaataagatccctgttgattgtcaccttcgtttggaccttgccggatgttgaacaggggagctggttgagcccactgcgacttcagacctacagaagtgtgagataataatttatgttgctgaagccattaatttactttaaattgtcatggtgccaatataaaacaaatactttattttataatgagactggataacgaagggcttgtgttgattttcaaggagattgaaaaatatatctcataaatctagtgaaaacatgaaagttctggggaggatgaaattgataatatcttttctatttgtatgagtccggttttgcactgctgtcaagaactacgtgagactgggtagtttataacgaaaagaggtttaattgactcacagttctgcatggctggggaggcctcaggaagctgacaatcatggcggaaggtgaaggggaagcaggcaccttcttcacaaggtggcagaagagagggaagtaggagcacaggaaaaaactgcctcttttaaaaccaaaagatttcgtgagactctctatcaggagaacagcatgggagaaatccccccgccgcataatcctatcacttccctccttcaacacgtgggaatgggtagggacacagaacaaaagcatagcagcatttatgttaattctgctacatcattcctcttagaccatctctctccgttttgttttcctagaatagcccattgcttgtattaaaatcatttctaggtataaactttattctcagtaaaaccttgaaaatgtgaatatacttggcatttttacttcgtcaacacagaagaaaattctgtacaaagccaaaattcttcttttgattgccctcgtaatataggaaaaaaagatggaaatataaatattttatatgaaaactaaaatcctctgatatggcctcaaggcatgttggtcagcctcatccctttcacaaactggcatcagtgactgctactctcagtttccttccttgtttccttccatatactctccctattcctcccccaaaatcattacttctagttaaaatcgatctttccttccatttttcattcttgtcaccattttcaggaaagagctattgcccctttctttgatcaaaggcaactccccaagtacaatgtttttttttcttgcctgaggaaggttattttttcatgttggaaagaaatgaaagattagaaaccaaaccacacacaatcttgcacactgtagtcaccaaggaggtaactttccaccattacttgagacaaatgcgtgtgtgcgtttttaatctagtctgacctcagagcctctaaatagatgaagaaatacctgtgtaattgaaaaaaaaaaactgttctctcagccattattcaaaggacactaactcaaataagaaatcttaaagctctttaaaatgcaaaaacattttcttggtggaacatcaaatgatagcttattcacattaattccataattacaacaagccccagtgaacaggtctggctatttttcattgaaaacaaaaaagtataacaatcatagaacacctgaatttattggctttaattaagcgtgtttgttctaaactgatgtaatttaggcacaatccatagaaaagaaaatatattgtatattcagtactgatttgcctgtccatataagaatatttacagtctagtgaaaattagcctgatgttatatacagaaaagtataaaacctctaataacattatttttttcatttaaagacaaaggtttaaaataaacttcatatattataaagtcagctaaagttatttttatttctcttaactaaatacactgagattttagaagaaaaatataaatttctgaaattttatacattatcaaaacaatttcactgaagaatggggtttcgatcaggaatcacagtgtttctaagaagcctattgattactttcctccaactattataagtaactaataaactatttttgctctgtttgaaatattaaactaatattaaatataactgaaccaactcaatggatgaactctagcattgaggtatgtctatgtaacgtatttgtgattatagcaataaaagaaatgcatttcaattttttttcagtttctactatatactagctaatggattagctttgtagtagtaagttgaagaatgggaagcagaaatagagttgaaaagataaatgaaatttattaagtccatgctgtggactaggtgtatgatggactttctgtacatatttatttatataagaatcttataaattaaaaaattatactcaatatataagaaaattgagactcagacaagtaaaataacccattcaagtttacataagtgggttttcaatccttattcatctagttccagtgcccatgacctggctctctggaagggagacaaactgaggaagagaaaaagtaaaataagcagtgaaggcagaaattgctaaactctgtagtgctatcaggggcacatgggcatcttcctggaactagcactatgagagtgtagccctctccctacataaacaccatttcttcatagtgaactatagagaaacttagaaggcaagacctcaactgcctaagtggacataaatgtaaaatttttaggtcttgtgcaggtcctgactcagagtgaagaacgtgaagcccttgctgcctcaggtgaggaacctaaatggatgtcaaataaactcagtaatcaaggtaaatgataatgtaatattttattaaatcaaaattaatgcaggaaatccatgatgaacaacatattaacattttaaataaagacaaaatcaatattactgaggttttctttcacttcatgcttctaatgtggcttggcaatggtgctgtgttgttactgatcctatcagactactgagcatctgctagagatgataacagtagagtcaaagggtgagtcaaagagtgcgtacatttaaaattcagataataatcatatttaatgactacagcttgaggttttaaaatttcttcatatctgtaggtgtagtgtctttatctattttaaaaatttccttctttctttctacttttcttggaaattgtcaaaagtgtactgtattagccttttcagataccatactttgaaaatatttatcatgtactctattttttgtttttatttaataattttatgctcatcaattccacctatatcttttctgctagatagtctacacattagttttcaacttgaagttgttttttaaatgtccaagtcctctcacattttgtatgcatattatagtttttcatattctatttgtgttgaaaactcttattccaagagcctttactcactaatactggatgatggataaattgtgttgtgggtgttcccatggattttcttttgcatatgtgagtttcctattcctctggggggagtgtagctatgtgtgttaataaacgaaaatgattcaagtcattataaacaagataatgtgtagagtgcagacaatgatatcttgaaaaagaataattggcactgacattgataactcaaattggaataaaagagaattaaacgttcactatcatgtagtgattccttaaattaaggaaggatttggatgtagatttatagaggaaacatgttaccaggacattcttaagaaaataaaaggatggctgaaaaaattatgtaaaacctgaagggtcattcaagcaacaaatagacataagagaactcagataacatcaccccaaaaatctagccaaagaatgagccaaaataaggagaaagtaaaaagagacattttatgaaatgacagatgaacaataagtcctataaatacagcacatagattaagcaactaaagaaaacttcttgcagtctacagaaaaaaagtcataaattttagtaaaacaagaataatgcaagttacaaaactccagaggttgcagaagagaattaaaaaaaaactgtcctcacataacctcttataaaaagatgtagactggagcagtctaaaaataaaatctgaaggtaaaatagaaaccacaggaacttctaccagtaactgcagatttgtaattgatatcaattctcccatggaacacaacaaaattttctttgagacactaagtgttaacaaaaccatggaaaattgcaaagcccagatccaagagatgagcttggcattgagcatcacttttcagctcaagatttttactgattctaggaagttaaaaaatagattgcaaaactaaggaatacttttggcagcaaaatgcatgtaactgtgagtgtgcaagggaatatggtggggagaattggagcacagtaccctccaggctttgaggtgggggcaaggactacactcgataaagaccagcccactcggggacataatcctagtgtctgattatctgtacaattatggatgcattaaagtaacctgctagtgtccttagcttactgcaaagagcaaatgtaattcctctgtagagaatgttaacatttccagggcctcaaattactctcagtttttcatatataatgcctagtactcaatttaaaaatacatgtaaataaatacatgatgagatatgatgaagaaattattgaaaaaaatgaggatgatgtggtttggcactctgtccctgcccaaatctcatctttaattgtaatctccacgtgttgaaggagggacttggtgggaggtaattggatcatgggggtggtttcctccatgctattccgtgatggtgagggagttgtcatgagatctgatggttttaaaagtggcagatttgtccagtgcaatggatcacacctgtaatcccagcacttagggaggctgaggtgggtggatcacttcagatcaggagttcaaaacccgctggccaacatggcaaaaccccatcactactaaaaatacaaaaaaaatagcgggtatagtggcacacgtctgtaatctcagctactcaggaggttgagacaggggaatcacttgaacctgggaggtggaggttgcagtgagccgagatcacaccactgcactccagtctgggctacacagcaagactctgtcttaaaaaaaaaaaaaaaagtggcagtttttcctgctctctctcctgctgccatgtaagatgtgcattgcttctcctttaccttttgtcatgattgtatgtttcctgaggcctccccagccatgcagaactgtgaatcaagtaaatcatttttatttataaattacccagtctcaggtagtatctttatagtaatttgaaaactgactaatacaacagacatataagagaaaaatcaacaaaaaaaaagttttgcctggaaaaaaataatgaacctctttataattgcataattatagtacaggtgttcctcaacttatgatagagttacatcctgataaacccaatataattgaaaatatcataagtagaaaatgcttttagtatacccaacccgccaaacatcatcgcttagcctaacctaccttaaacatgctcagtgcactaacattagcctaaaattgggcaaaattatctaacagaaagcctactttatcagaaagtgttgaatctctcatgtagtgtattgaatatggtacattattttgaaattgtgattgttttgcagtattgtaaagtcaaaaaattgtaagtcaaaccatcattaagtcaaggactctccgtatatttaaactcttttatacagacacacacacacacacacacacacacacatacatacacacggagaaagaggggaagagagtgacagaaagataaacagtgagacagaaagaaagaccagaaattaccagtgtgagaaattaacaaaggagaggacatcactacagtttctgtagacatcaaaacaagtataaaagatttatagtggccccagctagtgggataaggcaattaaaagaagttaaatttgtaaatattgaaaaggaaagtaaatgcttttttggagatggcatggctatgtacaaatgtcaaaaattatctacaaacaattagaaataaaagccagtttggtaaggtgactggatttataacaaatgcacaaaaagcaaaaatcaattgtatacctattacaattttgtttgataaagtagaaataattcatcacaaacaaggacagaaaagaaagggaataaacacgtccttaaattttgtaccctaggtgcctctcttgcttcacccaaggctcagtcctgatgaaaatggctcattatttgttagagaaatttaaattaaaactgtaatgacataccattctacacatactagtttgtctaacattaaaagactaacaataacgattacaaatgaagatacagaacaagggaaattctcatagactgttggagaaaaagtaaatggatgcagctacccacttacatatttataccaccagatacaagcaaggatgtacatagcagcattatttgtttaaaaaaagatgaatttttaaaattgcatattgaatattattcagcaatgaaaatgaacaaattagaactacatgtaacaacataggtcaaactcacaatacataatgttaagcagtaaaataaaataaatgggtgtgtatttgtttcctggggctgttgtaacaacttatcacaaacttagtgattttaaacaagataaatttattctctctcagttagagagaccagaagtacaacatttgtttcactgacctaaagtcaagatggcagaagggctatattctcaatggagactccaaaagataatccattcatggcctcttccatcctgtgggccttcctctattttcaaagccagcatcacagcatcttcaaacttctccgtttctattgttccattgccttctgctccctctgtctcctttttacaaggacatttgtgatggcatttagggctcactcagataacccaggatgatctcctctcaaatttcttttttctttcttcttcttttttttttttttttttttgagacagagtcttgctctgccacccaggctagagtgcaatggtgcgatcttggcttactgcaacctctgcctcctgtgttcaagtgattctccctgcctcaggctctcgagtagctgggattacaggtgccgccaccaccacacccagctaacttttgtatttttggtagatacgggcttttcaccatgttgaccaagctggtctcgaactcctgacctcaggtgaatccacctgcctcggcctttcaaagtgctgggattacagaatgagccactgtgcccagcctcaaatatcttaaatacatctgcaaatgccctacttcaaataaagtcaggctccatggattaacacttggacatgcctttcagaggcattattggcctaccacagaatgggtatataaatatcaaaacattaagaaaagtaaactccaaatagtgggtatctttgaagacaaatcaaggagtagtaatctatttcgcaaaaaaaaagttattctgagtagtagttgtgaaggtgtttgttttgtgataattccctaaggtgtatacattttcttaggatttgacattacatatatatgtttatgcataaattattcatagatatacatgtaattaaaatttaagaaataaattataatgatgcaatcttctaatgttttttaaatttttttaaaaaaatgtgaccttttaggaaataatgcagtcacgtagataaatttaatacttccaattaaaaaaagtagatatagtattcttttattataaaattattttttatctattctgctagctctctatctcactatacatatagttatgtatcttccatctatatctaaactttttggagtatgaaatttgaaacacatataactattttacagctattataataattgtatgtgcttattccttttaaacttgaaaaataccaaaaagtgcaaagaagaaacaaacaaacaaaaatcacccaaatgaataccaccaacagttaacattggttgtttctgaaaatttggggtgatttattttgttttctttgtactctttggcatgaagtatttttataaaataagcaaagtcattactataaaaatccctgaaatgaaacctatgtagaaattgtaataatgaagataacaaagagaggaatcactgcttacatagccatttatttagtgcttcccatctactatgcattattcagtgtgtattacatttcgtttttcatcatcacaataattttgcaagatatatacatacatataaaacataatattgtgtctgtatttattatagatgataaaacagagttgttttgtgagtttaagtgacagccagcaaacaatattgctgcgttatggtacccaagagttctggcttcagtgtgaaaaaaaatattcaatgttttccaccgccgctcaggatgatactaattcaattatgactgaatcagatggatgtattgacaattcagaagtgcagattatttaatgaaaccatgtacgtgtgcatgtttgttttctcctcaaatcttgctccccttcctcattctttcaaccaacacctaacacctccctcaaaacacacaatacacacaaacacaactaatgccttgagagctgaggccatagctgacacatatttcaacaccagagtctagcacagaatctagcactaaaagtctcccccagagtgtttactataaataaactagtgatgagactttagcttaaatccatgaccatcaactctgctgccactcttccaagcaagagttaggtccgtcattgaagctatgtagttgtgatttatgcagaaactttgtaaagaaaaccagagcttgggtagtgggtagcagtaatctcttcttaatttcccctatgaagagataaactcattgcagtctatagctaccaaacacagaggtcacaagacttctgtgacaagaactcccactgctatggtctccacaaataatgctaatggaaacagagaggaaaaacaattatcaaacaatcaaataaaggtctgactgcatgctctttttcaagattttgcatctgaggatatcagaaaggaaagcaattcagaggtgcaaattgcctaatgtgcaaatcaataacatgctggtctaatgctcaattttatgagattgctgttatataaatgtagggaaaagcaaataatcaggagccaaaattgtctcttatcagaggaagttcataattagtttgcgttttcacagaattccaaatagtactgattaattaagccaatatgtattccaagcaggaacagctacgaatagtcagcctgtgtggggagaagcacaaatacaatgaactcaaatttaataggcctaattgtaccaaagtaagtaacagtcaatgactgagcatgcagccctttccctagacaatctctaaaatagattttaactgaattttgtgaacagtatgtagagaaaatctaaggaaaaaaacacagtgaaggcaagaattcccaaaaggcaaatcagaaaacattaaaataatactatgaaagtttggttttcacaattaaggtatttttcaagttcaattcagtttctcattgttgtatttttcttttaatttttcaatttctagacatatttatgcaattatttgtaaatctgtctaaattctagaaaaatttttgcccatttgaatgccatagaaacagaaatataaaaacaattttaaggtataaatattcttgaggatttataacaaaatattgttatcccttattcaactaaaaatattcccttatatctgtgcccaattaaaataaaattgaataaaatgaatattttaagataccggttttcagcattttcttactttttttgtaaatcgtacaaaactaagtaaccagttctcctttgcataaagaactgctcaccactcttcaagaacagctgtttaattaggataaagaaggaaataatacagatacacctttctctcctccagaacaaagcaaagagaaagagatcaaattgacagagagtgggaagagagatgatttgttcttgaagacagacatgaaaggtcaagatacgaattttagatagacagtgtaagaacttgacaagtgaaaagataatcaactttgtgatcgaggtcaggagatcgcgaccatcctggctaacacgatgaaaccccgtctctactgaaaaatagaaaaaattagcccggcgtggtggcaggcgcctgtagtcccagctactcaggaggctgaggcaggagaatggcgtgaagccgggaggcagagcttgcagtgacgatcgtgccactgcattccagcctgggtgacagagcaagacttcctctaaaaaaaaaaaaaaaaagaaaaagaaaaagaaaaacctagaagaaaacctaggcaatatcattcaggacataggcatgggcaaggacttcatgtcgaaaacactaaaagcaatggcaacaaaagacaaaattgacaaatgggatctaattaaactaaagagcttctgcacagcaaaagaaactaccatcagagtgaataggcaacctacaaaatgggagaaaatttttgcaacctactcatctgacaaagggctaatatccagaatctacaatgaactcaaacaaatttacaagaaaaaaacaaacaaccccatcaaaaagtgggcaaaggacatgaacagacacttctcaaaagaagacatttatgcagccaaaaaacacatgaaaaaatgctcatcatcactggccatcagagaaatgcaaatcaaaaccacaatgagataccatctcacaccagttagaatggcaatcattaaaaagtcaggaaacaacaggtgctgtagaggatgtggagaaataggaacacttttacactgttggtgggactgtaaactagttcaaccattgtggaagtcagtgtggcgattcctcagggatctagaactagaaataccatttgacccagacatcccattactgggtatatacccgaaggactataaatcatgctgctataaagacacatgcacacatatgtttattgcggcactattcacaatagcaaagacttggaaccaacccaaatgtccaacaatgatagaccggattaagaaaatgtggcacatatacaccatggaatactatgcagccataaaaaatgttgagttcatgtcctttgtacggacatggatgaaattggaaatcatcattctcagtaaactattgcaagaacaaaaaaccaaacactgcatattctcactcataggtgggaattgaacaatgagatcacatggacacaggaaggggaacatcacactctggggactgttgtggggtggggggaggggggagggatagcattgggagatatacctaatgctagatgacgagttagtgggtgcagcgcaccagcgtggcacatgtatacatatgtaactaacctgcacaatgtgcacatgtaccctaaaacttaaagtataataataataaaaaaagaaaaagaaaaaaaactttgtgatctgttatatacttgcaatgtcagaaaaaataagatattatgcttcaatttcaaatcatcgactatagtactgtagttgatgcaagggatgtagattttaggaaaaacaaagagaccatgagccagacttgagtgtccttcctccaggtgtttttttgtcatcttaatcaaactaaggctcctgtatatttgggattcattgctagaagtttaatctgtcccattgttgcctttcacctgcttttttgttgcctgagaagtagattgatttattgattttgatttttaagttcaagaaggatattttagtgccaggcaaaggtacctaatttataaggtgctgaaaatgtgtgaagatgccacctttccactgagtttctaaaaaacttaattggcctactaaaataataggcttgattttgaggcctgactgccaggttacaaagtgctggctggctcagatctgtccctttcaagcttaatgaacagtctttgttcaacttccaaacattccatatggttagtgcttgatggaacacaatattttcacaaagaaagagaagttcaatacatttactcataactgctaactgaatagcctgtatagagtcaaaatttagcctatgtgtctctaatttttctaattagttatatatatagattatatatatatatatatatatatatggagaagttctatgttcctatatatatatatatatatttttttttttttggagaatttctatgttcactagctactctactctggggaacttatataaaatgggctgctagaacatgcatgattgatttggttttgtcgctgatacccacaacatcttgatttcccttgactttctactcagcaagctagtaaacaaatttattagtggcaatatcatagcacttttctctgatgagctcaaagtattttccaagcatctcctcattaatccttacaatatttctatgaagttaagtagcagagatatatctattttaaggtagagatcaaattgttttatggataggtgagttgtccagaattgtatagattattactggggaagagggaagaaaattaggtttcccatatctcagataaccatataatttattctgcaaaccaggaaacttgtgaaactgatagggacattattaataataatgccaagagaacactgacaaactgagaatacaatcatgccacctgtatcctactgaatggaatagtaagaaaatcacaatacccagttgaaagttgtaagccagaggatttgtttcattattttgagttgctgtaaaataaaattctactatgaatagtttgttgcatttacttccattatttttatatgtaatttttcaaacatacttggaattataacttacatgtaattttgtattcaggatttttaatttgacacttcaaattgttttgctaatatacaagaatgctttataaacatgtacaaattaccacattatgttaacatatatggatttaccataatcaacataaccatagttattatttacaattatttagatttatgaatagtgctccaatgagatttttagcatacatttttcatatagctttaacaatctccttaggatatatatatatttttgattgcctccagttatatttttaatctttatttacaatttattctaatttttaggctttaagtttaccttttgggggcatttattctttaatcttgttagaacttgttttggtgactggtagacgggaacaatcatgaatggtgtcattatttgtcttagtctgcttgaactgccatcacaaaataccacagactgagtggtttaaacagaaatgtattttcttacacatctagaggctggaaattccaagatcaggatctgtgaatgtttgctatctggtgagcattctcttgcagacagtccagttctcttactctgtcctcacattgcagggaaagagagcaagctctctggtgtctatgttataagggaactaattccatcatgagaaccctgccctcatgacatcatctaaaccttgttacttcccaaaggccctgtacccaaacaccatcacataaattctgaattttggattaaattacatctatctcattataatactattctattaatattatttaattggtaatatatgttgaagtttctggagattattgtttttctattaacatgataaattatagtaaactatttcctaataggcatccattcttgcttactaacatgaacactacttgattatgaagtatggttttaatgggattgcaacttttaagtgtaaagtacagctttagaatatttgcagtaatatttattagtggaataggcctgtattttattgtgtgtagtgtatatgagagagacgaagggaaagggatgggaagagaacacatgtgttcagctttggtcaagtttagtataaatacaatacttattagtgtaaatacaatatttattcataaatatatttggaagtatttttattttctgtacatggaaacatttaaagttatggatttctcctctccctctcactgtcactctcgctctgtttgtgtgtgcacgcacatgtgtgtgcatgcatcatttagccctgctgactgatacgcctggttatttatgatcaaaagccagacattgacctaagagaaaaagtctttagatgggatctccctccaaagaaattgtagttttcttctcacttagaggtagattctcttggtccaatcaggctgaaatgccttgaggctagatttcagtctttgtggcagctgctgcatttctagtttgccttttcagctagggattagctttttaggggtctcaatgcctagggagatttctaggtcctctgttccttgttgaactccaattttgtctatccttttgctgagaggtctgcttaacttccttttagtcaggtagctccattttatgctaagcttcttagttgctcaccttctgcaactaaagaatcagaaaatgttgtgaaggaaaaacaaaacgaaattgttttgtttctactggccctttatcaagccctggccaccatgatagtcatgaattccattttgtgtctatgcaggcctatcagatttctaacatctctgagctaccattttcttcttagctatctgctcagcaaatgtatccaaatgaaaggttgtggagaatgttgaaaccaattcaatgtgtttcacctctttctgggagcttacacactcaagttctggatgctttgattgctatcagaagcccttaaatagctacttatttttaattaattttatccagctttcataattgttcttgccaggtgggatggcctgatataaattaacttgtcatagctagaattagaagaggaaaactttaaagaggattgagttatcagtacttccatgtcttgatacatttcttcttgaaaatgttcatgcctgctgatttgtctgtttttttttttttctgacaaactcatcttttatttttgatgggtgtgtgtgtgtttttttttaacagggatttggggaattatttgagaaagcaaaacaaaacaataaaaatagaaaaacttttaatggtgatgacagcctcttcttcagtaatttctcacttcttggtgctcctgtcctgaaagatattaatttcaagatagaaagaggacagttgttggctgttgctggatccactggagcaggcaatgtagtcacttttattcttcactattaagaacttaatttggtatccatgtctcttttttcttctagtttgtagtgctggaaggtatttttggagaaattcttacatgagcattaggagaatgtatgggtgtagtgtcttgtataatagaaattatttcactgataacttactctagttttttatttcctcatattattttcagtggctttttcctccacatctttatattttgcaccacattcaacactgtatcttgcacatggtgagcattcaataactttattgaataaacaaatcatccattttacccagtcttaaccagaacagacattttttcagagctggtccaggaaaatcatgacttaaattttgccttagtaaccacataagcaaaaggtgcccatttttttctttaaaagtttttattcattatttatttattattattatactttaagttttagggtacatgtgtacaatgtgcaggttagttacatatgtatacatgtgccatgcctgtgcgctttccgttgtggggtcgggggaggagggagggatagcatagggagatatacctaatgctagttgacgagttggtgtctgtttgttgagaggagaatgttcagaattttatatcttcaacatgtttttctgcgttaataagatactgagattttataactcttgtcattttggtcacttatattttcatatggaaaaaatcatataatccagggtttccaatatatttctgtaaaattaagaaaatgatcttatctaattacttgatcaatatctgtgattatattttcattgccttccaatttgaatatttgttctctattccttcttaatctggattgaggttctgattaattattttaatgttgcaaattgttttcactttttccataaaatgagttcttgagtttatttctttactgcatcattctattttcaagtcatgaacttctgactcaattaaaaaaaccctcaccgtttctatgaaattgttgtgttcatattttattttttatttactgtatagttcagtatagaatatataatattataaaatatgtaataataggataaaaaataagatacaaaaagtaaggggtgtgagtttggaaaattatacttgctgatatggtgaaataactctgaccaaattaacctttcagcaataaaaacaaaattggaaaactggataaaatatacatggtaacatgttaggtcagctttgtctgtcttcaaacaactataaatattgttctacccttgttacttatttattcttttccattttgttttgctcaatttttttcttatacccatttatttgagtaaattttgaaaatatctattcttcatttttgctgtttctagtgtggtatatatttctcagataaaaggtattttcccttttatctttccctaaactcacactacatatattgcatttatcttatatctgctttaaaacctatttttgtctttttaggtcacttacatcagaggagttgtattggtgcgggaaggggaatttgatttaatgaaacaatgcattaaaaatttgtactcactttgtgattcaatgatagtcaatgtggcatgtaatttttttctgtcttttaatattatattgtctttgttgcttttctctaacatgaaatatatgttacacaggcacagtgctggtatcttttctattattatcttcgaataggactcattattgtctgagctgtttattaaaatggtaaaggaaaagatcagtaaagtaaattatgccaataggcagtatcaatgtaggtctattttccgtgaatattttctcagcaactgtgttgttatgatgatattggtttcatccacagttcctagcttataactcccctagcacttgttacagtcttttgttataatattgggtgtgttaggcctcaggagcaggactctcaccttctcatggccttttttcatttttatgttcctgcctttctggttgtgggtcttaagaccatctcaggagagagtcccaccctataccctggagggagggatgctgatatcatgaaacttccatgaaaatccaggaagacagggttcagtgagcttctgggcagttgaacacatggatgttcctggagggtggcccacccagggatgacatggaagctctgctcccttcccccatgcattgctctaagtgtctcttcctctatatcctttgcaatatcctttataatacaccaggaaatgtaagtgttttcctgagttctgtgagccactccaacaaattaatcaaatccaaagagggggtcatgagaacccaacttgaagccagtaggtcagaagttcagaggcctggacttgtggctggtagggttgagggtgggcagtctgggggactgacctgtgagacctgacactatctccaggtagacagtgtagtgtcagaactgaattagaggacactcagctggtgtccgctccttggtgtatgtatggaggaaaaaacccacacatttggtcacagaagtcttctctgttgctgattgatctttgtggtgtgagactagaggaaaaacagagagagttttctctacacagcaactatataatttgtgggaatatctctttttacacgtagtcctacatctgtctagctacagtcatttatctggccttgggaaatgtgaccgcagaatcagatatacacatgagattaaataatacatgggtatgtcatttaaatatctagaaaagttatgacttcaccaggtataaagaatataaaaagaactctgtcaagaatcatacagtaaatagatttttgaatttaatctagtacctaaacaatcagagtagggaggttagatattaaaatcaggctaaagatataggcaacgtggatctagaaaacatggattgcatggccatttcacttagagttcatgggcttggaatctctattaacataatttttacaacgttagaatttgttcccatattaatgagggaaaaagaaacaattaccctgagtatctgaagctccagatctcattttccagtcaaaatctctgataggtaaacaacctgaaaaagtagccacaactcactgaggtgataaccccatttgcttaagataatataattgtttttatgattttttttatcccaggaaaacattgaaaaaagagtttagagatgatgaagtatatgaaaactataatatttatactttagagaggtggtatttatttataattgtattagtatttaaatatagattagcattttacattccaattttaaatgtgtaacagagtattttagatattggttttttttttttttagttgaaattataagcggctttaccgagttgccagtagtggtttaacattgaagataatttaagattcatgattttgtgagttgaatttattagctctataagggttgtttaagttctctgaaggctttatttgttagtccgataattaaaatgttcacaaagataattgaacatattaaatttataaatgtggattaaaatctttaagggagtttaattaactaagttgtaaatggaccaaacattaatcaaagtcccccttaaaaataatttttaatgtactagatttataaatagaacaataagatttctaatttaaactcaaaaattgtttaaattggtttacaatttaacataatatactgcacattaattcagaatatgaaatcttataagtagtcctttttacattcaagaatcacattgataaacatcacaaaatgcccactggcaaccactatgaaactctttaagcgataggtcctgtatgaattttactcctcatgatttgaagattatgcataaattccttcttcttgttattttgtttccaatttagtctttacatagacaaaactcctataacagaaaaactgaaaacaaagagggtgcattccttcgcttgctttctgaggatgccctactctaaaaggcagtagctttcaataaactatgtcttcttctcattgtactcggtgactcatcttgaattctttcctgtgtgaggcccaagaaccctctcttgaagtgtggatcaggacccctttttccaataacactagtactgttataattaggtaaatgttactcacacctgaaacatggagcatacattattgaatttcatttctacacaacattttttcccttaaactgacaattttttaaaatttttgttttgtttgtttttctgtgtatgtatcaaagtaccaactccaaattctaccgtagttttctaatgagtctcataatgcattcagaagcattagacattttatcagatttatctttttgaagtttttttttctagatagctcgaatttacacaggttgctgtgtacacatactgtacatctaacaacaaggagattccctgtactttataccctaccctttcttcgtttacttcctcattttagtgaaactcttctccagtaaattcctgagataggatgtattggatgtagagttttagaatcttgccatgctgtaaatgcttattattgtttcctcctttctgatttacagtttggttggagatactattctgcattagaaataatttgttttatggctgcatagtattcatgtcctttgtagggacatggatgaaattggaaatcatcattctcagtaaactgtcgcaagaacaaaaaaccaaacaccgcatattctcactcataggtgggaattgaacaatgagaacacatggacacaggaaggggaacatcacactccggggactgttgtgggttggggggagggggaagggatagcattgggagatatacctaacgctagatgatgagttagtgggtgcagcgcaccagcatggcacatgtatacatatgtaactaacctacacattgtgcacatgtaccctaaaacttaatgtataataataataaaattaaaaaaaatttcacacaaaaaaagaaataatttgttttgcaatttgtaaggctttgcttgtcttctagtggccacttttatttctcttctctggaaatttgaagtgtcttctttttttttttcctggggtgtgctgatttgtgtctgtgtgtgtgtgtgtgtgtgtctgtgtgtgtgtgttggtctaggtctattttcaccattggcttgaattctggtggacacattcaatctgaaattcatacacttacctcttactcatttcaaaaattatttatatatatcattgtatttttttcttttcccaaatgcctgtatttggttggtggccctataggaccaattatttaattcattaaactttctctttctcattcccaactctgtttacactaacttttctggagatgcagtcagctttaccttccaaatctcccattaagttatatatttctgcaataaatttcttaatttgtcagaatcctatttttttgaatatccattttatatcacatcttgctcttgttgtattatcttatcttccctctctgaggaaattaataattacatttttcccacactgtatagattctgtttactttcagttgttttgtttattttttgtttctgtgtttgttattgtctgtacctagaatctcgtgattgttggttatctgtttgtgttcaagaacaatacaataaacgtttacggtaagcttcaggttcttaggtaataattgtcaactgtggcttccagacagggcaatcaggtcgagaagttttcccagaaaagcccctcatgacatatccactggtctattcctttgggctgatcatgatcttccaactagagtcttccagtcttctctgagcgtaatgttttgaatctagatagaggcgaaaattggggagatctagctttcagtagttactgttcattttgctcccctaattcatgtatgaccaatgaagatgatattgccagtacgaagattccctgttacctctctagacagcaaatgtctacttttccaccagcagaacctggagacattcacgaggcttgatggagtgggcattggaaacagtctttcaaccaatcttcctgggttttagccctacttttacttctactttcagaggtatcccgtgcaaccaatttatgaacattttgtggaatcagatttccccactacttacaattttgcactttttggtaagctaactcagttaccagacatttatggacttcctattttcaaaagtgttgcttttctctttttatatcacttgaataagccatttgccatcatgttatagtttcaggtgggaaaataagtctctctacgtgtttaacatgccatatttgctcaggtgtctgcatctactctcaccattttctgaagaaaggctaaattgttatgacactaacaactagtcttcatagtttggtttataatttttaatggtgtttatttttaacaaaattggtggagtttttttctttgtattttgatttttcttttggttttcagttgttttaagaaataaatggagggagatatatgcttcctttgttcccattaaccaaaagaatagtttgaacaacacaggaattaacatttccattaagtttaagaggacctgcttgagacacagctgggccttgagcttttaaaggtgctataactttataccagtttcatttttttctattgttggtatcttcaaatgttctcatttctctagatttatttttatagttaaattctccctaaaaaattaacctcttcatatatattttcaaatataatgaccaaaaggtacatattacattcttttgaaattttctattatccagttttccatttttcttgttatattttaataggctctctcttttttgtcatctaatttatttgtcttttcaaagatacaattttttgcatttattgaaaaattccattgttgttgggatggaagaagattaaatccttcaaataataggccaggcatggtggctcacacctgtaatcccagcactttgggaggccgaggtgggtggatcacttgaggacaggagttcaaggccagcctggccgatatggtgaaaccccttctctactaaaaacacaaaaatacaaaaattagctgggcatggtggcacgtgcctgtagtctcagctacctgtgaaactgagacatgagaaatcactcaaacccgggaggtggaggttgtattgagccaagattgtgccactgcactccagtctgggtgagagagaaagactgtctcaaacaaacaaacaaacaaacaaaaacaaaacaaaacaaaaaagaactttaaataatagtatattgttttgcagattatgagatcaatagatatttattgtaaaatgcacaaatagtgcaacatttcttaaagtagacagtgaaatatttcatgttgccatgtttctccaagaggtactattggtttggctctgtgtccccacccaaatctcatctcgaattgtaatccccacatgtaaaggaaggaacctggtgggaggtgattggatcatgcgagcagcttccaccatgctattctcatgataatgagttaagttctcaagagatctgatgggtttataagtgtttgacagttcctccttcacatgcttactttcttctttgcctgccaccatagaagacatgtctgcttctcctcctactatcatggtaagtttcctgaggcctctccagcatgcagaactgtgagtcaattaaaccttttttcctttataaattacccagtctcaggaaagtcttttatgacagtgtaaaaacggactaatacagccatgaaaaatgaatattggttaaatggtaggaataagaaagaacattcttggcctagagagtacaaaaggaaagccatggggttggacctaaaaagaatacaaaggaagaggagagaagagtactcattgtgctcaggagctgaattgggaaattttttgcaaaaccaagaaataccaaacttagtgaactattgtgggaccagtgaataaagaaatattaaagcaatgaaaaataatttaagtaaatatgagaagaaaaattaagaatatctgtatatttttgatcaaaggatgtaatgtttaaagttatattataaattattctatgtatggaattaattatgtattaaaaagaataaaagtcagacaaactataaacttctctcattcttcattttggaacttaaagaacttatgtatctaagttaatcagatatttttatgttatttttacaaaaataatttacaaaattaattttacaaaattaatttagtaatatttttattgtctgttttttataaaaataaagtgtaagattttactacttcagataacttttgctataagtcaatctatgtcttccaagaaaatctcttggtcagggctcatacttctccaccaggtttcagatttgatttcttttcagtgagctaagatttgttactgtgtccccttaaattgaaatagacataattaatgtggctatagtgagattcatcttcaatatagtaattgtgttctgaaacattcatcttaaaatgaaatattttctcctctaactggagtctttcatttacaattaacttaaacttttaatctttacactggaaactcttctttaaagaagatatgactattttgttctcataaaagctagactcttgcagaagacagaaactgcaacggcaggaagattaatgtggatcctggaatctagaaagttgtctacaaactatttaaaatggttactgtaagaaagctcaaaaagagaataatcattcagaataggaagagatagaaacccttaaacaattaaaataacattaccaggtgtgtatagtcagagggagagaatttgcctatattgttctggggaaaaaaataaaatatttctgtataacatcatagaactgtaaatggagatgttaaacttctctgatgggtagtttgagaaaaattttaaaaattgaaaagttttattttttgagacggagtctcgctgtgtcatccaggctggagtgtagtggcaccacctcggctcactgcgagctcagcctcccgggttcatgccattctcctgcctcagcctctcgagtggtgggactacatgtgcccgccaccacgtccggctaatttttttttttttttgtatttttattagagacggggtttcactgtgttagccaggatggtctcaatcttctgacctcgtgatccgcctgcctcgacctcccaaagtgctgggaatacaggcacaagccaccgtgcagggccaagattattgttttaatgtgtgaaaattaatattgaattcttgtgtttatataatatggtgtcctataatttctgtttggaatataaaatcagcaactagtatgtattttcaaagcattataaatacagagtgctaagttacttcactgtgaaatgtagtcatataaagaatataataattatactggattctttttaaatgggctgtctaacattatattaaaatgtttctccagtgattcattatatccaaatgctccaggcagggcgtggtggcttacacctgtaatcnnnnnnnnnnnnnnnnnnnnatttattatagcaagacaatgctattctacagaaatataatctgagtcacaaatgtgaatcacatatgtaatttaaaattttctagtagccatactaaaaaaggtgaaaagcaacaggtggaatttatgtttataatatatgttatgtaacccaacatatcatacatagtagtagtgcaatatgtacttgtaaaaattactaatgagaaaccccattctcttataaaataaaacaaaaaaattagctgggtgtggtagtgggcaactgtaatctcagctaatcaggaggctgagacaggagaattgcttggacttggaaggcagaggttgcagtttgccaagatcacaccaccccactccagcctgggtgatagagcaagactcagtctcaaggaaaaaaaaaaaagctcgaaaaatgtttgcttattttggtaaaattattcattgactatgctcagaaatcaagcaaactgtccatatttcatttttagaaactacatattaaagatctaaaacaaaggataaaatatatgcaaaaatatttgtatttctggataaattagtttcctgagttaactccttgactgttgacattgaatctattttaaattaaacaaggtgctgataaaacaaaagacaaagaaagaaattcaaaataaaattgaaagatgaaatcagagcttaccagaggtaaaatttcctctgacagtgtaaaagagatcttcatccaaaaagcagaatttatatagtttctttccaaaagaccataaaaccaatcagttaatagttgatttttatgtgaaaaaagagagtgtaaaagagaaaataatgacaccaaaatcccttttaaattcaaagagtcatcaagtttcaaaaatgtaattcagataagaaattaatgtcagccacattcctccacagtaaaggtttgtatcaacttttcacctaatagttttagcattcattaggaaacttgtttcaaccattattttactaggtgttataacagggtggtacattctttcatttttttcttcatttattagctggaataatttcctttttttttttttcaaacagggaattctttaattgtaacaccatcttttaacctctgctctttattctcttttctttccagtttaattgtagcaattttgatttatttccttaaacaataaaaagtccaagaaaaaatctagtacatatttcgtgttcttggtctgacatttaattcattgaactaagtacaacactaaacctcacaatatgctttagcccttgtcattttcactttgaaatacgtttattaaaaactaaagaaatgacttaaatatagccttctaacttagcccattcaatctagaaggttctttaaaaaatatgctatagagcaatgacaatacatgttaagattttagggatctttttattaaaagtgttgtattacttaatatattactatagtaataataacaaattatttatttatttattttcttttttttgctttttattttattttatttatttatttatttattattatactttaagttttatggtacatgtgcacattgtgcaggttagttacatacgtatacatgtgccatgctggtgtgctgcacccactaactcgtcatctagcattaggtatatctcccaatgctatccctcccccctccccccaccccacaacagtccacatttcctcccaaatgtgtattgattacaccaaaacacagtttggacaggaaaacaagataagtagacaaatgcttgatttttattcccctccccacttttcacaataatgaagtagtgcttcaacaaactttagtagtgattaaaaacttatttcccataataaaaattttaaatatttgtaagtaaatgataaataataatttatccagtatttcatgagtacctataatcagtcaggatccattctcccacactgcagggaaaggagcccagtttaaaattcctgtcaggacaccagcaagatgatgaaatagaaagcctcaaagcccctccaccctcctctccaaggagacaccagctcaataataatacacagataaatcccctttgtgaaaagtacagaggcgaatttaaagactctggattccctggtaggcttcaagccaggcacatcaaaaccagcaggtaaatttgttgcactcactcatcctccctcagcagtacaacgcaatggagagaaagctccaaactcccagctcatctctagggagagaaaggaaagtctagaccatatgtccaacattttgactttttgggagggcactagcacctatctaccctgaatctaagtgctaacaggaaaggatgccagattgcatgcctgctgataaagccactgtttggactgtcactcaatcaccagcattcctcctgtgactcagtataacaagattgggagaatattctacagttcctgattcccccacagaagtgaaagagaatactggaacactcattcagtgttcagacttcaggggagttgtcaagtgattgttttctgtcttgcctgaatttaagcgctaacaggaaagctttccaggttggggatattaagaacaaatgagttgaggcagtttgggttagcatacattcacttatcatactatccttccctggatcaatatgcaatgagtgggagaaaaccctcaactcctggcttccccttggagaaggaaaaagctggagtgtgcatccagaattccaacttttcccagtcagcctgatggactgttttctgtctgactgaatactcttgatgtctgaggactgctgagaacaaaagagagctagggggttatagcaactccagataacctacagtactatagatagataacaaagagagcaagagattacacgctcctgaagaaagacctgcaaatttttctaagaatttacacacaattccagagacaatacattcacggaaagatttgacacacttcagaatctctagctgggctgactggtgaaaggatttcccagtgcaaaaccagtctgtaaagacagggagaagtggttatttttttcaaatcctagaatcgcagcacaaaattaaaatgcacacaaggaaacagggaaaaatggcccaataaaaggaacaaaataagtttcaaatatcaacccttcaaaaatggaggtatataaattatctggcaaagtgacatatactgacatattctccaggatggatcacatggtaggtcataaaacaagtcttaacaaatttaagacaaaggaaatcaagaacctgttttgaccaaaagtaggatgaagcaaaaattcaatagtagaaggaaaactgaaacatttacaaatatatggaaattaaacaacatacaattggacaaccaatgagtcaaagaagaaatcaaaaacaatattagaaaacaaactgacaaaaaaaaaaataaaaaacacaacacagcaaaacttagaaatgcagcaaaggcaggactaaagagggaaatttatagcaataaatgcctaccttaagaaagaagaaggatctcaaataaacaacctaactttacaactcaaggaactaaaaaagaagaactaagcccaaacccagcaaaatgaaagaaataataaagattaatgcaaataaaggatattttcacacacatattttcattataaccagaaagtagaaccaatgcaagtgaatagatttaaaaaaaactgtggtattactatacaatggaatatggcaattaaaaagagaaaagactcaaccaaataaaataaaaaatgaaaaagtagacattgcaattgatgccacagaaataagaaaagattataagagactgatgtgaatgattatggtagtaattggataacctagaaaaaaaatcaaattactggaaatatacaacccccaacactgaatcaagaagaaataaaaatatgaacaaatctatagctagtaaggtgtttaaattagtaatcaaaaatcttccagccaagaaaatctcaggcgcaggtgactttactagagaattctgccaacatttaaggaagaattaatgccaatatttctcaaacattcctaaaaaattaaagaagaaagaacaattctaaactccttctgtgaagctagcataaccctaatatcaaagccagacaatggcgctacaagaaaaaaaagttaaatattcctaatgaatgtagatgcaaaatcctcaacaaataccagcaaattgaattcaacagcactataaagtatcatccaccataattatgatggatttattcctggaatgcaagaagggttcaacatgtgcaaatcaatataatatgccacattaacaaaacaattaaaataacatgttcatctctgtagatggagaaagagcatttgacaaaattcaacattctgtcgttagaaaaacacttgaaaaaataggaatagaaggaaattattccaacagaataaaggccatttgtaaaaacccacagctcacataatattaatgaagaaaaactgaaatctcttcttctaagatcaggatcaggaacaaggcaaggacgactttatgaagcgcagaaagtcctagctaaaataattaagcaagaaaaagatataaaagccttccaaattggaaaggaagaagtaaaattttctctattcacagaaaacatcatcttatatataaaaaaaaccctaaagattcaacaaaaacctcttagaactaataaaatgaattctactgcaaaatattgctgaaagaaattaaggaagacacaagtaaatggaaagccatctcattttgatgaatagaaagaatatttataaattctaatactagccaaagcaatttacagatttaatgtaatccctataaaaattccaatgctaattttagagaaatagaaaggacaattctaaaatccatatggaaccacaatggaccctgaatatccaaaacaatcctaagaaagaaaaacaaagttagaggcctcacattttctgactttgaaatatactacaaagctacagcaatcccaatagtgtgatattaacgtaaaattaatcatgtagatgaatggaagagaatggattagtggaacagaatagaaagcccattgggaggccaaggcgggcggatgatttaaggtcaggagttcaagaccagcctggctaacatggtgaaaccccgtctctatggaaaaatacaaaaattagctgggcatggttatgggcacctgtaattccagctactcaggaggctgaggtaggaaaatcacttgaacccaggaggaagaggttgcagtgagccaagatcacaacactgcactcccatctgggttacagagcaagactccgtctcaaaaaagaaagaaagaaagcccagaaataaacccacatgcatatagtcaaatgatctttgacgagggtgccaaaactatacaatggagaaaggataatttcttcaacaaatattgttgggaaaactggatatccatatgcaaaagaatgaaagtgaacccttatcttacactgttcacaaatgttaactcccaatggattgaagacttaaaagtaagaactaaagctgtaaagctcttacaagaaaacataaagaaaggctttatcacattggtcgtggcaataattccttggatttgacaccaaaagcacaggcaaccaaagcaaaaataggttagggtgattacatcaagataaaatgcttctgtgcagaaaaggacacaacggagtgaacaggcagcctacagaattggagaaaatatttgaaaactgtatatttgctaagggcttaatatccaaaatacataagaaacacctataactcaaaagcaaataaacacataacccaatttaaaaatggctaaattcttaaatagatattttttaggaagacatgcaaatgaccaacagggatataaaaagatactcaacatcattaatcatcagggaaatgctaattaaaatcacaacaggatttatcacctcataactgtatgatcattttttaaaaaaggaaaatagcaaatgttgatgaagatgtggagaaattgaattagaaccttatgtactgtcagtaggaatgtaaaatggtagagccactatggaaaacagtatggagggtcctcaaaacattaaaaaatagacctaccatatgatgcagcaatcccacttgtggacatttttccaaaataattgaataattccaaaataattgaaaacaagatcttgaagtgatatttgcattcccatattcattacagaattattcacaatagccaaaaagtagaaacaatctaaaagtccatcatcaaatgaacagatgaaaatatggtatatatatatatatgtatgatatatatatgtatgatatatatatgtatgatatatatagtatggtatatatatgtatagtgtatctatatgtgtgtatatatatatatacacacacaatggaatattattcagccttgaaaagggaaattctgtcgtatttcaacatgtgtcaatcttaaggatattgtgctaagtgaaataagccagacacaaagacagatatatcgtgattccatttatatgaggtattgaaagtagccaaacacatggaaacagaagataaaatggtagttgtcagggcctggaggaaactggaaatctggagttgccgttcaccaggtgtggagtttcagtcaagcaagataaaaacattctagatttctgctgtacaacaatgtgtatatcattcacaaaatgttctgcaaacctaaaattttgtaaagatggtagatttttttgttatgtgttttttaattacaaaaatttctgtctgtatttagtttacattttagtaaggaaagagaaataagctaataaatggtaatgataaatgctgtaaggatatctagagcaataaaagaagttatggatatgggaatataattttagatagtgaagatttctgtattcaaatgccacatggaaaaaggactaaggggaatgaggagatgagtcatatggaatgcccaagacacagaagaaggcaggcagagaaaataacaaggataaagacactgaagtaaaatcatgctttctatatttcaaaacagcagcaaggacactagtgtgacagagaaggagtgatcaatgggaggctgcagattttgtcagagatattgtcaaggctcaggatcatacagggacttgtaagcctggaaagcactttgaattttattcagaatgagatgagaagccattgaaaagtttttaagcagatgagtaaaataatccaccttgtattttaagaggagcattctaccttctctgtggaatagagaggtggaagggcaaagcttgaagcagagagagcagtgaagagtgtactgtaatattcttatgtgagaaatagtagagggaatgagaggtggtcagccttaaactgccatttgttctctgtatcagggctcagggactttcagactctccagggattccttacagtttttacattcgtttctcagttgcaaacataatctcttcactctatgagaactctagatctgaatccttgttatgagtcaggagtccactctagtttactctcttgtcagtaactagacttgaaatgttttaatattaattgatgtagtaatacgattggttagagaaatagcaaagagcgagcgtccccatcctatgaccatatcagcaccagaagagaaaaacacatctacacagtttttcccttggcataggccctggtattctgtcagggaacaggttataaaggaaatacaaagggtctttgtacttactttcagaatgtattttctttaacatgaaaagaatccaaggtctttttgcttctaattgctttttgtgtatctactaccatcccttggtaaattattgatacttttcctcaaatctcggcatgatgtcctacattccaaattttcaatagctgagaatttcaccttttcagtaccttcatgtttatcttagtaaaaatttgagaaagactgtaatagagttatttaatcagatttttttaatctaccataatttttgaataaggaaaaacatcaacactttttctccttacttggcaaataatttccatagagaggaaaaaaacaatcaaaacaggtacaaaatgtaacaaaaccaaaggaccatgtgagttgaaatttaaaatgagaaaaatgtccactttactttgggcaatgcaactcctgggaaatagtaactcagcacctgagagctaaataattctacaggactaaatatatattccggtacccaaggggaaaatgacatcatagagtgtttaggtctattaaaacatatttgtagatgtgtaggtataaaaatgcttttagagatgggaagagaaaaaactcatttatttaacaagttctgttgggtgcttttcactaaaagagaaacatcacatgtttataacactgaggatgtaaattgcagtacatttcaaattacatgagaaaataaagaaaatatctgtttcaagtcactgaataattcatccttatttagtgtttgtccctaatatctgtgattttatgaatacttcagagcaatgattttacctttctctacagctgtatttggcaaaggtccacattatttttgttgcaaagatgcagccaaatttcttagaataggaacaatgtttagaatgtattttttccataatgaaaaatattatgaaaggggcaacttagatatagcttacagggttctctattgtgataactaaaacagacttagcctcaagtaaaattgacatcttactaactgttggtggtgaaggagaaagaagacaacattgagccagactggggaaagatgaattcaaattagttagagatttgtcacccaaagcaaaacaaattcaagcttgaactgagttgacattgatagttattatgaattgcaaatccctcaaattcatacgttgaaatcctaactctcaatgtattagtattaggaggtaaacctttgggaggtaattaggtcatgaagaggaaaccctcatcaaaggaaagtagtgcccttctaagaagatataccagagagatttttctctcctccatgtgagaataaaataggacagccatctgtaagtcaggaagacagccttcaccaagaacccaaccatgctgactccctgatttcagatttacagcctacagatctgtgaaaaacaaatgtttgttgttttagccactcaatctgtgttttctgttatagcagcccacattgactaagaaaatactaaagcctttatttgatagatgaagatagtatcagacaaggtatcatatgagtaaaaacctaagatttatgtgtgatcattttacactggagcagctactgaaacttaagaccaaaaccactagttaacatcagtatgtcaacccaaaacatttgggacagtaatgaagatacagcaaatgaattgtttaaatatataatcaaggcaaagttatcatcagaaatataggaaaaatatccactaaatttggtttacgagaaattcatgattcattgtataccttgatactgggcttaaagcagcaatcctaattccagatctaccttcaagtctgggtcagtgttctcaaatgctgccagtttcatgtcaggaccggcttaatattgaaggtaactgagcattgctaatgtctgactggagctgaaagaggccaaaagcagggctataactttcagaaaactgacctggtgttaacttccatccctgccatttcaaacgggaagttatcgcaattagaagctattagcagtcttatctaataacttgtggataattcctttttttttctttttttaagagtcagggtctcactctgtcacctaggctggagtgcagtggtgcaattgttacggaatctttggggtgtcgattttctggttggaaaactgtggttggtggcatctttgcccgagttcttgtcctgcatccaggaagaatggtgtaggtagacaagtgaagggttaaaggagaggagatttattaagtgttagaacacctcagaggagacccatagtgggtagctcctctctaggttgttctgtcaagtgttcagctctcagcagaaagggaagccctggagagggttgtttccgtctgcagctgttagttcccagacatctctgcaggtctctgaagcattcagcagagaaagtagctggccctcccattgtctccagctatcagcagaaaggataactccttcctgactctagtcttccctcctctgtcttctgccctgttctggctcagtcctgggcttttattgatgtcagaggggaggaagtgtatgcccattggtccatgggcagccatggacgggcccaggaaaaagcaccatgagttttgcctccaatctgcaggactggcagcctagcctgcaggttgggcttcactggggaccaattcccttccacccaggagcctgtctgcctcccacagccatccatggcacccaggcttctggcatcaaagggcacttgcaggccagtgcccagccaccgtcggaccccctcagcttcccctcccatgttcctgctcctcggtgtccaaagtccagagggggctgaggtggcaggggactggcatgtcagcactgcttccaatgtgtgcacacctggctgggctgtgacagcaccctgctgggtcccaaccccactctgagatcagagcacagagccaggaggtgggagagaccaggcagcaggaggaggtgcctccaagcctgcaaggggcaagggggtcgttcccagcctccccaagagtacaggtttgcctgagtctgcagcattggtttgggtggctgggtggtgggctggggtggggacagagtaggggagttggataaactcctgtctgctccatggagtgggaggtccaggtctacagctacagctgcagtgtgggcagctgaagcagcatccagggagctcccattccaactcagaaggggcagggcttccacttgtccccatcctgcaaactccagggagcatacaaccccggccacacctctcccctgcagctggcatgatggcagcagccgctgccatcacaatcatagcttattgtggcctcaaactcctggtcccaagtgatctttttaccacagtctccccaatagctggggtcacaggcatgtgccacaatgcccatctaattgctttttattttttgtagagaaggtggtctggctatattgcccaggttaatctctaattcctggacttaagcagtcttcctgcctcatcctcctacatggccgggattacaggcatgagcaactgtgcccagctcctgataaatcctttcttaatcaaagccttcatcagcagccttacttaccacagtcttcccagatgatctcaggtttccaaagaaattaaaagtagctactgctgacaaaactgttgggttccctgatattgtgcaagaatataattatgctaggtcttccgttagctagctcttcttctgtaactgtctctttctatgtattaatcaaaactgatgcaactttttaaagaactattcctagaaactttcttccttcccagtcagatttaatgtattatttatccatttaaaggactatataagtaggacatggtttgggtatataacagcacttacggccatttactttgtggttcagtgatttctgtgtgcttctgacttgtatatactctcagcccttgtagatgtagtggtggtagttttcccaacttaaatttatctttatcatccacctttatccacagtcctcctcatgtttagcacattgtcaataaatatttactaagctgaactgaaagtttttattatgcataaatactaagatgtacatgtccatggtcattcaggacagcagaagtcctatttttttttttttaccagtgtatctattgctaacaattgcttcaaggtcaggagccaactcatgtactagacatgtaaatcttgtgaaaatattcataatggaaacagcatgtagcaagtgcaaacagaactaaatacatccttaaatttatcacagtcccttcaaagtatgaattcttcttctagcattacatcaaatttgataaaatccaaaaatattttatctcaatgttttaaaagtgttgatgctgtatacattgagttgttgtacaattgaatggaacccacattcaaagtttttcctcaatgttaaaattaaatggttctctctgtgattctttctgtttgcagttcttctcatttcattgttagaatttgcctctactaatgtaattaatttggcattgcagatattctgatcttttcaaatgtgtattttgacaggtgcctcaaacattcatccttggtttgtgctgtgggctgaaggtttatatctctccaaaattcatatattgaaatctaattcccaatatgttggtgataagatgtgaggccaggctggacacagtggctcacacctgtaatcccagcactttggaaggccaaagtggacagatcacaaggtcaggagttcaaggccagcctggccaacatggtaaaaccccatctcttctaaaaatacaaaaattagccaggtgtggtggcacacgactgtaatcccagctactcggaaggctgaggcaggagaattgcttgaacctgggaagcagaagttgcagtgagctgagattgtgccactgcactccagcctgggcaacagagcaagactccatctcaaaaaataaataaataaataaataaataaataaataaataaataaataaatagggaaggtctttgggatgtgagtaggttaagggggttggggagccatcatgaatgggttagtccgcttacaaaagaacccatagagagctactttgccccttttgcccttatgccatgtgaagatgtagcagtaagtctgagaaacaaacctcaccaggtaacaactctgctgccacctagatcttggacttcccaacccccagaactgagaataataaatttggtttataagttacccagtctaaggtaatttattacagcagtccaaatggactcaaacaagttgtaaacagttggaaaatgagtatctgtattgaatcgcatattttagccaaagtttgcttgtaggaatacagcctatgaccaaagaattaatagctgactctcatttgaatggccaagatttgctctctatttcctgtattttatttttgtgcctgtatgttggatataggcaaatttttacacaacaaaccagaaaagttcaatagtctttcattctctgctttcactaacttcttttaagtatatttcaacaattatcttaatattgtcaccagtagattaagcgtactgttataaacactctatttctatttattcaaaacttgaattgagccagctgctaataacattttttaattagcattgcaaccatattcacctaccatatttttccctctcctttgatttctgggtcattactcactttcacaatttctatgtgactcaccattctatacctattttgccttaccttaaaatattttttgatttaatacatttacattttttccccttttgcttttagaattgcattactatcatggagggttttcttttcctttttcaagagtttctcaaaattcttgaccaaagccctatcccctgaagtgagtaatattcttcactatattaccgcatcacatgtttacatctggctaaagtaagaaacactactcgtgttctgtagctaattgataattgttaaaataaacttaatgattgataacaaattatagaaaatgattattttaaggtactttatacttgtaatatttgtaaataatatgagttatcacctctttctgtagctaattgtatagggagcacatgcagttagtggcatgtttcttaacacatttctcatatcaagaataacaaatacaatgcagtggggagtggagaaaagaaattaaatgtggctacatctgtaagtaacaattgcagccactttgtcaagggtaaaacaatcatccatgagctatacagattatttgcaaccagaataactgaatcaagaggttccaactcattaatttgtttcattcccatatacctgaacatctgggacatgaagaaatagtgtgtatgtgttaataggcaaagctgtagtaatgacttctacctactagaagcagttatctattttcctgttactatctaatttttacacaaaaatacttgagatgaatattgacagaaactcagaaagaagtatggcctaaattaatatgaaggtaatgtagtaatggcagaaatttacagcttaaaagtttttacagtaggaagattattgtaatagtgagagccatgtataagtttgttttgaaatgataatgtacagctaaagagtataatgctcaaatttttgtatatgtagtttttgtaattcaacaagtagggttaagagacactaagaattatacagaatgttggattttatttcacgtctgttcctcttgtgagacattgccatctttcccatgtttcatcaggtgttcagtaagttaacaacattcactctgtgaaaagtaccacatgatttattgtataaatatagttggaaatacactgtggttcctcatatcctcaagtttataattcagtttggagactacactatataaatgtagaaatgccataattatgcttataaattgactttttaaaacatgcaaattaatatggtagaaactgaatacataagtatgggggtgccatataaaataatgatcaatgccagtgggattaatcaaggaaagtttcttggggaagtgaattctaaacagaatttggtatatttgtttagcacacattttatgttttctaattataaatacaatgtattctcatattctcaaggtaataaatttgtaaattttaaattagtaggaagagtaaaaggaactaagatcccactgtccaaaggtaatcattattcagtttcttctcttttccttccatttggttctctgatattttcttcatggttgccattatatcacatattcaatattataacccactttgtgtttcagtcagtgtctatacatacaactttgaatgatacaaatgtttcatagaaactaagtttaatcaaatcaagaaactaagtttaatgccagtctatatcaatgtacagtttccttctagctaaatatttaggcttttccaaattttattaacataaataactccaaagatatttttgttaacattttctcttagtgttattttcataaggtagactttaacaatttactataataaattatagaaaatgatcattttaagtttccttatacttgtaatatttgtaaataatatgttatcacctcttttgaattagttatttcggcttgatattttattgcattgatcagaattcccagaattgtaatataatgctaattattaaatcttacattccttctcatgttaatagttattattttgtaaatatgatgctattagcaaattttagattgacatccttaatatattagttagatgttagtaattccacttttccttataactgtgtttttctttttaatcagaaatcaatgttgagttttgttcaataattttattatatttattctgattttcatattactttctattaacatattggtaagtttttctaagattttccatatgtttatctgaaaggagttcggtaattttcttcactgttgccattatcagattatatatccgatttacaaaagttttgttaaaaatttggttcccccccatttttgtatgtcattgaacattttgttgacatttcacatttcttgattattgaaggaaatctataagtccattgcttgtaaaggtttttttggagaaaagttactcttttttagtatatactactttgttattgctgtgttcacgtattaaagttaaattatctactttattaagacttaaaatattaatatatcatagtatcaactttaaatatcttcacatctgttgttatatgctttatttctaatttttaaatgtgtactttatcttgattaaattttattgaaacttatctattttcttattgtttcttttttaaacaatccagtcaggattttgcaattatattttttatgatttatgattttattgttattgttaccctcatatatcttgcttttttaaataaatttgtataacttattaaatttgatgttgtttattttcttttttttaagtagacctttacctgttctttcttcacccacttacgtttgagtcacctgcaatgtgtcagcttctactttccctgatctttcttgttgctttcccttatttcttcctataatccaggtatgatgatcttccaattgactctcatggcaccctacacttctgttatcacagcacatgctattccattgtgcaaatggatgggcgaataagagcactttcaggactttatcataatgtttcaaagtcatattttttttaagagacagggttgtgttctatcacctagcctggggggagaacaatggtgtaatcatggttccctacagccttgaactcctcgtttcaaacaatcctcccacctcagcctctagaataacttggactacaagggtgtgcagccacacccagctaagtttttgcttttcatttttgtagagatggggtctcactctgttaaccaggctggtcttgacctcctggcctcaagtgatcttcccaccttagcctcccaaagtattgaaattacaggcatgagccaccacaactggtctgaaaattcttaaatccacttatgggctatcttctaactgttcccttcctctatttatgtctccagtaaatttcaactcgttcttcaaatctggcttctgagtgaccttttcagagattctccaatgtattcaagtaaatgaaacaactgacttctatgttttttcattttattttatgattaaatatcaaaatattgaaataaacaatatgtcctaagtaggttttttttctatctcaagttcttgattttgaggcctttaaagatagaaacaacggaatcaggtccttgaacacaggagttaatcagtaagcatttgttgaataaacaataacaggacatctttctgctttcctaaaactcatcaaagaattcttactcattctaatccatcttcccttatgatgagaccaaaccactcactgtggtcaacggcattaaaaaataaaaagtggggggtttccagaggttaaaaaatgtggacaaaactatttgaaatattcatgtatttctgaactgattcattaaataattttcactattaatatttgttaaatgcctacacatcattagggaccgtaagtatagcagagaacaaaacagaaaaattttccggccacatgaaatctatattctagaggacagaagaaatggtctgataagaatcaggaaagaacaagatatgtccagattaaatcataacctttatgtagaataagagtgaaatcactgtaagctatgttgatatttgaccaggctacttgaacacttttagataagtgctttaaagctattggtggcttttgaacaagaaactactgtggtcattgaatttcatgacagagtgcaaaagaagtggaaaatgtacatataaatattctcaggccacaatgtgccatatcatggaaactttgcaattttccagatgacagagaatagaaatatgagacatgacaatggaaatgatagtgaaaggatgaatgttaaatacactgcagaggagtatgaactggcaagaattgacagatgatgagttaagcaaggtatgaacaaatgaggagtcaggtgattaagaagggagggggaataaaatcatgcatcgcttaataacagagatactttctgaaaaatgcgttgttaggcaatttcattttcctgcaaacttcatagagtgtacttacactaacctaaattgcagcccactactgcacaactaggcaatatcgtatagcctatcgctcctaggctacaaaactttatagcatgttactttactcaatacagtaggcaattgtaacacaatggtagatatttgtgtttctaaacaaacatcaacatagaaaaggtacagtaaaatacaataagatagtcttatgggtctaccatcgtatatacaagtctgtccttgaccaaacattgttatgtggtgcatgactgtaatatggtatcatgttgagcagaaactctcaaccttccctgttgaggtacactgataaaaactataataggaaatgtatttctgattgcaaaatctcataattatgagcaatttgttctttcataaatttaagagaattctccagaataacaacactcactttcattgctgtatgcttgtctttaaaagtagaaggaaaagttgatgaaagtatggctaaagttggaacttctctctcttctaccctggctgcagcattagtgaataagtataatttttatgactgtaacaattaaatatttctctttctggactttacttttccagaaagagaatctttggaggaaaagctgatctgtgaggcagtaaaggaaaagtgttaatgtttatgccatatgaacctttagaagaaagtcattttttgatggaagcttgcttgtatcaatacatgcatgcatggaaacaaatactctcttcttccccatgtcttttgtatgctatcctattccaccagtcctgaattagtgcttttgccctgcagctaactctctcaagttcatctttctgaagtccgaatctctctcttgaatgtttctggccttagtacctaccctgtaaacgcactaaacctgatccatttacagactagatagttttttggtccaaaagataattcatggaatttccctaataaatgtatattaacttatatcattttaacaattgattttcattgatcctgatgaggattggctattagttgattattatgtgtatgttgtaaagatatacatggctgtcagaaaagaagatattttatgccataaaatattatgagacaattttttaaaaataagactatgtttttcctgaaacaagctatttctacaaacatatgctttcatgaaattttatttctcatgttacctttaagattaccttgttgtatgctgactatattaataaagttagagattctgtgaagttttaagagattttctctcttttgtttttttttttttctttaagttctgggacagaacatgtacagaacatgcaggtttcttacataggtacaaatgtgccatggtggtttgctgcaactatcaacctatgatctaggttttaagctgcacatgcattaggtattttttctaatgctctccctcctcttgctccacaccccacaacaggccctggtgtgtaatcttcccctccatgtgtctatgtgttctcattgttcaactcccatttatgaatgagaaaatgcagtgtttggttttctgttcctgtgttagtttgctgagaatggtggcttccaatttcatccatgtccctgcaaaagacatgaactcattcttttttatggctgcatagtattccatggtgtatacatgccacattttctttatccagtctatcattgatgggcatttttggattggttccaagtatttgctattgtaaatagtgctgcactaaacatatgtgtgcatgtgtctttatagtagaatgatttataatctatttggtatataccctgtaatgagatggctgggtcaaatagtatttctggctctagatcattgaggaattgccacactgtcttccacaatggtggaactaatttacactctcaccaaaagtgtaaaagcattcttatttatccacagccttgccagaatctgttgtttcctgacattttaataatcatcattctaactggcatgagatggtatctcactgtggttttgatttgtatttctctaatgaccagtgatgatgagcattttttcatatgtttatgtctgcataaatgcccccttttttttttttgagtcagattttcactcttgttgcccaagctggagtagttaacagcacaatctcggctcactgcaacctccgcctcctgggttcaagtgattctcctgcctcagcctcccaagtagctgggattacaggcatgcatcaccatgcccagctaattttttgtatttttagttgaaacggggtttcaccatgttaaccaggctggtcttgaactcttgacctcgggtgatccacccaccccggcctcccaaagtgctgggattacaggtgtgagtcaccatgcttggccctcaatgtcttcttttgagaagtgtctgcttatatccttcacccactttttaatagggttgtttttttcttgtaaatttgtttaagtaccttgtagactctggatattagacctttgtccaatgggtagatcacaaaaatgttctcccactcttcaggttgccagttcacactgatgatagtttcttttgctgtgcagaagctttttagtttaattagattccatttgtcaattttggcttttgttgcaattgcttttggtgttttagtcatgaagtctgctcatccctatgtcctgaatggtattggctaggctttcttctagggtttttgtggttttatgttttcaatctgtctcgagttaatttttgtataaggtgtaagtaaggggcccagtttctgttttctgcatatggctagccagttttctcagcaccatttatgaaatagggaatcctttccctgttgcttgtttttatcaggtttgttgaagaccagatggttgtagatgtgtggtattatttttgaggtctctgttctgttccattggtctatatatttgttaggtaccaaaaccatgctgttttggttatcatagccttgtagtatggtttgaagtcaggtagcgtgatgcctccaactttgttctttttgcttaggattatcttggctatatggacccttttttggttccatatggaatttaaagtgtttttttctaattctgtgaagaaagtcaatagtagcctgataggaatagcattgaatctataaattacattgagcagtatggacattttcattatattgattcttcctatccatgagtatggacattttttttttcatttgtttgtgtcctgtgttattttcttgagcagtggtttgtagttctccttgaagaggtccttcatgtcccttgtaagttctattccttggtagtttattctttgtagcaattgtgaatgggaattgactcattatttgtctctctgcttgtctattattggtgtatatgaatacttgtgattttttcacattgattttgcatcctgatactttgctgaagttgcagcttaaagagttttggggctgagacgatggggttttctacatatacagtcatgtcacctgcaaacagaggcagtttgacttcccctcttcctattggataccttttatttctttctcttgcatgattgccctggccagaacttccaatcctatgctgaataggagtcgtcagagagggcatccttgtcttgtgccagttttcaaagggaatgcttccgcttttgcaataagcgtttattgtgttgaagttttgtgaaaatagtagattaggtttttctaccagttgggtatcttaaaaaatcctttagtactcagtttttaagttttaagtaaaaaagatcacaagtgactaattaaagttataatgagagtactgtaagtattccaaaatagttgtttctagtggtgatatttagggtgtatatttggtttggattttgtgcatatgtatttctaagttacctacagtgaatacatttgtggacatcaaacactctatgtttctttttttgtgatagcttgtgcctgatctaattctacattagcgaacagattgaagaagtgaggagacatcagatagatgtagacacttcaccaaggagtccccctgcagtgccacaggggcagtaggctcacttattccatatccttggcatttgcagggatagacatacacagggaggcacggggagctcctgaggagcaagagcagatggtcaatgatgggaaaaagttgcagtgtcatagaccctgtttcttttaatggaaactcagggatggatggcttggccataaactattaatagtacctctgggaaataataatactcaatgcaggacccatcaaaactgtttctcaaatttaaaagatccacagggttgcagaacagggacttagaaatagtagaggcaattatatttaaaatggatggtcacaaaaccatgattctgggttagtatggtttgcctcctcagtaaataagacatggaatcatagcagtaaaagtattttgagtctggcattttacacatagaaatgtgaatccctttttacatttaaaaaatgcaaatcaatagaaaatatgtgcttttatacataggattttggtttaaggactatattttagtgcacagtcttctacttaacaaaatatatctgcattcaaaataaattatttgctatgaagcagagagtaaaatttatcagggtcttaatattataagttaaattttatattttgaggttactaacctggtttggattttgtacatttacacaacaccttacggaagaggttttcaaaccacattccacagaatgtccctttttaaggctaagtaatattccactgtatatctgtacgacattttgtttatccattcttctgtcaatgaatgcttccaccttttggctatcatgaataaagttgctatgcacatgaatttgcaaatatctgttgaagtccctgctttcaatttttgggggtttaaacccagaagtggacttggtaactgatatagtaattctatgtttcatttttatttatttatctatttatttatttatttatttttgagaaggagtctgactctcttgactcactgcaacctccacttcccagattcaagtgattctgctgtctcagcctcctgagtagcttggattacaggcacgcagcaccacgcccagttaatttttgtatttttagttgagacaggttttcaccatgttggtcaggctggtcttgaactcctgacttcgtgatctggccacctcggtgtcctaaagtgctgggataacaggcatgaaccactgatcccagcctatgttccatttatttttaattttggaagcactgtactcttttccaccatgagtataccactgtagagtccactgccaatgtacaagagtttcgatttggctacatcctcaccaacacttgttattccctgcttttttgatgattgccatcttaatgtgtatgaagttgtatcttactatggttttgatttgcatttccttagtaatcagtgatgttgagcatcttttcatgtgcttgatggccacttatatatcttttttgggaaattttctatgtaagtcctttgcctattttttaatagggttgtttatttattgttgagttgtaggaattatttatatattctgcatattgatcccttatcaaagatattatttgaaatattttcttccattctgccagttgtcctctgattgtacaaaagttttaaattttggtgaagtccaatttacttgtttttttcctttgttacttatgcttttggtgtcagaaagcttttagtttataattttaactatatcatgtctcctgcctcatatgtaccactggacaagatctcttttatgtgctctgcttctgtcagaggtaaatgtattttgaagtggagaacgaagataattgcaaaattggcctggagaactaaggtaattatgaaagttacagatacaagaagagagggctcaatatgccagcagttctctaccaatccatcctagcggtcttcttttaggattgcctaaataatgcaggggatgggtgcaagacacacaagtgttccagaagcatgtaaacaaggtacagagaaaaggataagataaaataagatgagctaagaatattagggaagtcctgttcagaagatggcctacagaggcaaaagggccagtttcattttgctgagggaaacagggtggtaagaagcctcgtggggaagatccgcgcttaccctgctacagagaggtgtaaaataacgtaatgggagagcattaggctgagatagctcccatggccagggttcctgtgtagacaaaatgaaacaagctcagcccaccaacaagtggcccactaagtattagctgtgtaatgagagacctaccaccaggatagttccaataatgcaactgcccaaatttttgccaaacaaataatttctctactctacttctacattcaccctataaaagccttccctacaaacgcctccagtagatcctccaaccactttcagtttggagctggctgatccatgaatctctgtttgcttaaactctttaaattgttaatatgcttacatttatctatttttttctcatttttaaaaattgagatgggatcttcctatgttgtccaggctggtcttaaactcctgaattcaagggatcctcctgcctcagcctcctgattagctggaattatagatgggtgcctccatacccagcttacatttatctttaaacaagggtttgacccctttctgaaatgtatttgtgttaagacctgtaccgtaagtgatatggcaggctcaatttagaccattggacacttttgtctctggaccacaatttgccctttgtgacctgctctcctaagaaattcaagtgtaattcaagttagtttaccctctgctgatcaggggagattgctctgggtgcaaactcaagacaggcactcacaccttcattcataccccaaatctcaacatcacacaatacacctatgtaataaacctgcacaggtaccctccagaatctaaaatgaaaattgaaattccctaaaattttaatttcatcttactaaaaaacaaagataaatttacttctttccaattttgatatacattatactgacatacacactatattctatggtgaattatgttgattgaatttcacattttaaactaacactgagttactttgaacaactctattgggtcataatgtattttgtttttaatatattttaatacaatttgcaaatattttgttttaaaattacatctatgttccataaataaataaatatgtaaaaataataaatgtttatattattcaagtgaagattacagcgatctttttgaatatctacttaacctcagctagctttaaattcagaagtagcaactccatagaaattcaacttatttctaccttattactcatacttgtctccttgaagaagcttcattgctatcatccagtttagactgggatgtcacaaatctctagactgagtagtataatactcactattcaaataaaatcaaattattataatgttatgacacctccaaatacaaaaatgaagcccatggatgttaggttaaggtatagagacaagtattcctacttagtatcttttagggcagacatatcccagctaaggtgattgcaaaatgaaatggaaaccatattgtggaaggggacttgagactcagattggattttcattccaactcttatatacacaagctgcatgactctgggcaaattgcatattctcttagagtttcaatttcttcatctgtacaatggaggttaatgcctatgggctatggctgatgtggtgataaaagaaccaacagggattcatgggcagggcctggtccataaagcagctggcatcaaccaatggaagcccccttcccatcttgtctttgcgtgcactacaaaatctggaatatgtgggtataaaaaatactcttataagagacagaattggaaacttttgcaaaaagagattggaaaggtgtcacatcttgtggcatgaggagctgtgggcatacacttgaactttgtgctgtgagatatccacagaacttcagtagcttaagagaacagtttagatgtcatcttagtcatctaccatagaacttcctcttctttccgagatttctcgacagtaacttttacagctctaataatgcagttctctcccaattgtttggactattctaatagatacaaagcagtatttcaccagcagatgctactgcagttcatatgatgatttcaaactgagaatccatttacagttatgcaatgcatattttttggaaatagggtgaaagtattttaagattaaaatcctatgaaataggtttacagtaaataattatttgttgcaatgtctatcttactatcttatattcacacatgtatcggtgtcctaataaatatatgtggtgagtgaaatttacttgagggcagagactgtgccatatgttccctgcaccgctgatgcccatatcagcacgtgatatacagtagatgctcagtaaatactttaacttaaaaaacgcactaagaataaatcttagaagacatcaaaatacatatgagtacaatctagggacatggtcaggagctcaaaattcaatcttatttatttatttatttgtttgtttgtttgtttgtttagagacagagtctcactctgtcgcccaggctggagtgcagtggcacgatctcggcttactgcaaccttcctctcccgggttcaagcgattctcctgcctcagcctccagagtagctgggtttacaggtgcacactaacacgcccggcttttttttattttttttatttttaatagacacagggtttcaccaagttggccaggctggtctcaaactcctgagctcaggcgatctgcccactttggtctcccaaaatgctgggattataggcatcagccaccgcgcatgaccacaaaatgttttaatgtagcttcaaaacccctttgtaaataggcttattcataacaagatgaaaacaagaaaacattgagcttcatataacagaagggttctgcctggatttgcatgtggccccatcatttgtttgctgttgggccatggtcaggttacttagctgctctctgcctccacataggctttatgcctgtacatccctcatctacaaaacgggaataataagaatatctaacagttagaagtggagaaaacatatataaaggtctttgaaaagatcttgtcaaagctcaataattgtcctcaataattgctctcaataattgtcagctattattaataataatcataatcacaaaaatgtatgactcaaagaaagattcctacttcatacagcttgccaaaagaatatcagacattggacctgtgaaaggaatgacattgagatttattttcacatcgctaagttggttttttctttgccattcaatttctgcagtccccactctaagtccatggtccacctttttatttttccttctaagatgtcttcccttcttgtaagattttctttgccttaagaagggcccttttcatccacccactcttttacccttcccagaagttggttaatgggcacaaaaatacagttagatggaaggaacagaagaagttctagtgttcaataacacaaaagggtgatgatcgttaacaataacttattatacatttcaaaatggctagaggaaagatatggaattttcctaacacaaataaatgataaatatttgaggtgatggatatgcaaattatcttgatttgatcagtgcacattgtatgcatgtatcaaaatatcacatgtaccctagaaataattataattgtaatgtatcaataaaaacaaaaagggcttatttctctttccttcctcccagcattccctcctatcccagatatgtgttgctcctggggctctcttgccccacgttcagtcagcactgagccagcaggaaggatttcacaggtcatatcctgagatcaaccctccaccccttcaggtaatgatcctcctgctcttaatcatttatatcctttggttcatagatattttgagtcaagtgccttctaaccgctgagctacataatattccttggtttttaaagaaaatacaaagtggattttagcaacaatcttgagtcatcacagaagctaatgaagttggggattccatgaagccatccaagcacataaatcccatttcctgggtcccttttccttagctcaaggccacaaaaatcagaacatgaattccagcccatatttgcattatgtctaaataattatgaaatataaatgaagctaaaaaaagctaaatatgttctattcttctacttcaataactataccgccataataacccacaaggtcaaagtccagtgtagaattctctgagttcttggtgctctgcatgggaatgtggtagtaaagggagagctgatcctcagccccaggctacatttttttctttcatcatagctagccttgtccttacttgagaagccttgcgttctcctgtgtgggggactccctaggccccatggaagctccatccgcaattctaaccccttcagacagcagagccttgggcaccatttggacaagcacagttttcactttgaaattgacccagggaagaggccatgcaggctcaggtacatttggccagggtcctgagtgtccagtgtgtgccctagaagagagggtgagagctctgggtgggccagggtacagtcagtggagggccagagaggcaccttctcaagcgcaggattcagggcgggggtcctcttgccaagatcgatggctatgattcctctgtgcaatgacgactgcatcacgtcttctcagcgcacctttctttcagtctcagccaccgtggggagttccttggaagcacaggcttcccttgtgctgccagcaaactcaagctacactttccgccccgggacatctccactattgtagggttttgcctaagcacaaatacagcccagaaacacttgcaggttaacagcctcaggggaagacctcaaccagtgtgggacaggtgggcaaatgctcgaggcttgtgtttcaggtggacagtcctggataactttccagagcctctcggaaggtcccgcataaaaaaagtccatgggagcagcctcaatggcattctattattttggcttttttttcttgcctggctcactcctcccacatctcactcttgcttcttggaataactgcccaaataaatcatccacacccaagtctttactccagctctgctttcaggggtacaggcacaccttggagatattgcagtcaccacaataagacgaatatcacaatagagcaagtcacatgaaattttttgcgagtcacaagaaattttttgctttctggtgcatataaaagttatgttgccgggcatggtggctcacgcctgtaatcccagcacattgggaggctgaggcgggtggatcaccagaggtcagaagtttgagaccagcctggccaacatggggaaaccccgtgaaaatacaaaaatggtggtgagcgcctgtattcatagctactcaagaggctgaggcaggagaattgtttcaacctgggaagcagagtttgcggtgagacaagatcacaccactgcactccaacctgggcaacagagtgagactccaactcaaaaaagaaagttgtgtttaaactactgtagtcaattaagtgtgcaatagcattatgtctaaaatataatgtatataccttactttgaaaatacttgattgccaataaatgctaaccatcatctgggccttcagcaagtcataatcattttgctggtggatggtcttgtctcagtgttgatagctactgactgatcagggtgatggttgctgagggctggagagggtgtggcaatttcttaaaataacatgacagggaagtttgccgcgttcactgactcttgctttcacaaaagatttcactgtagcatgctacgcagtttggtagcattttacccacagtagaatttatagcaaaactagacccaatcctctcaaaccctgccactcctctgtcaactaagtttgtggaatattctaagtcctttgtcgttctttccacaatgttcatggcatcttcaccaggagtagattccatcccaagaaaccactttctttgctcattcataataagcaactcctcatccattaagattgcagcaatctggccaggtgcggtggctcatgcctgtaatctcagcacttttgtaggctgaaacgggtggatcatctgacgttgggagttcgagaccagcctgaacaatatggtgaaactccgtctgtactaaaaatgcaaaattagccgggtgttgtggcacatgtctacaataccagctactcgggaggctgaggcaggagaatcatttgaacccaggagttggaggttgcagtgagctgagatcgcaccattgcactccagcctgggcaacaagagcaaaactccatctcaaaaaaaaaaaaaaaaattgcaacaattcactcacatcttcacgctccacttttaatactaatcctcttgctatcttcaccacatctgtggttacttcctctgctaatgtcttgaacccctcaaagtcatttatgggggttagaatcaacttcttccaaactcccattaatgctgctatttttacctcctctggtgaatcatgaatgttcttagtggcatctacaatagtgaatccatttatagagcacgggtagagtagatttagcataattcttaagatgtgccctaggatttatggaatggcaaatgagcattggcttgtaataagagagtcagtctgtcctttaaatctttttttttctcgtgagataaggtctcactctgttgcccaggctggattgcaatggcatgatcttggcccacttcagacttgacctccttgactcaagcaatcctcccacctcagactcctgagtagccagactagtagcatgcaccaccatacatgacttattttttttttattcatttatttttggttagagacagggttttaccatgttgcccaggctggtctcaaactcctgagctcaagctattctcccacttcagcctcccagagacatgagccaccctgcctggcctctaaattcatcttatgtggactgattttcatggtcaaaatgtcctgaattgactgtggcctgttgggaggtgggatggaggaaactacttatggaaattgaagaagggaagcacaccagaagcaagaaagtgtcatcgatttttacatcaaggactccatggtaaagagaaagaacaggtagcctgtttttgtggctgaccattggactgcggactgcacctgcatctaccaggttcttctggatagtcccagttttaaatttttgacctggcattcatgaacacagtgctactggtcagacctttgtccaggtttaagcttcagaaaataatttcttcatgcagtgggaggcctggttagggttatgattctgccctggggcatctgacccttcagacctggaggtaaacttggcatctacaatttacctccacatttgaacagccaaggatgggctgagcacaaaggctcacatctgtaactccaacactttgggaggccaaggcgggaggatcgcttgaggccaggagttgtagaccagcctgggcaatatagtgagaccttgtctctgtaaaaacaaacaaacaaacaaacaaaaccaaggatgcgtgggtggcagggagcagttcaacatgggaaaccattaatctgagagctggaaggacccttagaccagccccctattaacagatgagactgccctgggattatagcctaaggtaatgcattgaacttttctagagatttgaaaataaacaatcctaaaacccccaagcatactgctactctttgctattgaatagtgctttctagtccaggtgttgtgggtcatgcctgtaatcccaacactttcgaaggttgaggcaagtggatcacctgaggtcaggaattcgacaccagcctggccaacatggtgaaaccctgtctctactaaaaatacaaaaaattagcacgccatggtggtgcatgcctgtaatcccagctgcttgggaggctgaggcaggagaatactttgatcctgggaggcagaagttgcagtgagctgagattggaccattgcactccagcctgggctacaagactcaaattccgtctcgaaaatactaatgataataataatgttttctacaagcaaggggttactttgtactgggaactggtgtgaagggatccaccatgtgtcagtttttggattgatgacagttatttccagatcatggaagtgggaatgcttgttgataatcttctatgttctttgttatattgattgattttttaaaaaagctagcatttttataacaataaagtcataaaaataagtaactaaaataaagtaaaataatctaaaaaggccaagcgtggtggctcacacctgtaatcccagcactttgggaggccaaggtgggtggatcacgtgaggtcaggagttcaagaccagcctggccaacatggtgaaaccccatctctactgaaaatacaaaaattagccaggcatggtgacaggcacctgtaatcccagctactcaggaggttgaggcaagagaattgcttgaacctgggagaaggtgcttgcagtgatctgagattgcgccactgcattccagcctgtgtgacaagagctaaattctgtctcaaaacaaaacaaaacaaaaatctaaatgtaattgaattgaatatttaaacttttaattgacatttcaatttagattctaattccatttaaaagagcatctcatagaagcaaatgtactcatttatgataactctgtggtttcatttaagcaatttgttttgtgaagggacacaaatccaaccagattttaacagtttataaatatgtatttattaatttaattacaatgacaatactctcaactccccatttgaataaaggagagcatctgatctgtgttctgggacagcgtgcactgtaggtgtgtggaaataccgatgcccttagctgtgtggcaggctcagtgggacctggagtgcaggagcccctgggtcattcacctctgaccacaaaagtcgttgtccatttacccccaactgctatagaaatactattttcagtggttgttatgatgcaaaagaaaagatgcagggagatttattaaacctttacatataagttatgttagtaaataaagtctactttcttctggcttaactaaaaaatctttactagtatttatgcattttggaaaataaagatgccaatttaaatattatgaagcaaagcaattgattattagttaagacagccaagtacaactgcagagttgtagaggttatgtgttacatgtataagaatatttcatagcaatattttaagactctgtgaagacactccacagtgaagcagaaattagaacagaattaataatactgtgtatgctctcagttcaacaatttatcaaaactagctttgtaattcaggaggctgtctgctcttttgcaattggaagaaaagaaataacattttatttttcaactctttagattttcttcattaagtgtatttccaaagctaagtaagggagttgccagtagcaccaagagaaaaaagcagtcttgagcagcttttaaaaattggtcttaaaatatggaaaatggagccaggtgtggtggctcactcttgtgatcccagcactttgagagcctgaggtgggaggattgcttgaggatgaaagtttgagaccagcctgggcagcatagcaagatccccatcgttacaaaaataatatatatatatttttaaaattagctggatgaggtggtgcgtgcattagagtcccagttacttgagaggctgaggtaggaggagttcttgagcccagcagttcaagtctgcagtgagctacgactgcaccagtcctcaagcctgggcaacaaagtcagaccctgtctctctctatatataaagatatatataatatccatatatatatatatatccatatatatatatatacacacccatatatatatatatatatatatatatatatatatatatatatatatacacatacatatatatatatatggaaaagggaaggggccaaaatatcaaagacattattgaagaagaggaaagatttgtgctggcaaatatcagaacttttataaagctacagcagttaagacagtgtggtcctcactgataaactgactaattaaacagaatagagagttcccaaacaaatctccacaaatttaatctttgatatgtgatgtaggtgacatggcagatcagcaaggaaagaaaggacttttcaataaatagaatagaaaaataatggttattgatataagaaacaaaatgaaattatattcctgccttgctctatatacaaacattaaattccagaggaccaaagacttacatgtcagaaacaaaacttcaaaacttttagtagataatgtaagtgaatgagacacaaaaagccatttaactattaaaaaagattagacattttgactatcacaaaattaagaactttttacatcaaaaagtggaaagataagctgggcacagtgtctcaatcctgtaatcccaacagtacatcacctgaggtcaggagtttgagaccaggctggccaacatggtgaaatgccatctctcctaaaaatacaagaaattagcttggcattagtggcagacacctgtaatcccagctacttgggaagctgaggcacgagaatcgtctgaacccaggagatggaggttgcagtgagccactgcactccagcctgaataacagagctagactctgtctaaaaaaaaaaaaaaaaaaaaaaaaaaaagaaattaaaaaataaaagtaaaaaagtgaaaagataaactataaattagaagatatttgcggtacctaaaacctatgaaagattacaatcagatcaactaagtataaggagctcctatgaattaattttaaaaatagaaacccaacagaaaatttggaaaagacatcaatagggatttctcaaaagagaaagcacgcaaaatgtaaaaaaatttctcaacctcattagtaatcaggaaaatgcacaagatactacacatctattctccccacaattattaagaagtttgacaatataaaatgtattagtccacattcgcagtgctgatgaagacatacctgagacagggaagaaaaagaggcttaattggatttagggtttcacatggttgaggaggcctcagagttatggcagcgggtgaacagcacttcttacatggcagtggcaagagaatatgagaaggaggcaaaagaagcaaaagacgaaacccctaataatcccatcagatcttgtgagatttatccactatcaaaagaatagcatgggaaagaccggccccaaagattcaactacctccgtctggttccctccctgaacacgtaggaattctgagcaatacaattcaagttgagatgtgggtagggacatagtcaaaccatgtttttccactcctggaccctccaaatctcatgtcctctccaaatctcatgtcctcacgtttcaaaacttattacgccttcccaacagtacccgaaagtcttaactcatttcagcattaacccaaatgtgcactgtccactgggcacaagcatgaacaccaccgtttgttgcaccgtcgccccatatgcctccggtgacacacaatcacaccatctgctctgggatacaccagtaccacgcctggccgcatggtctccacctcggattcaccccagttcctgtttgctcatgtcctgtaaagcactctcggctttccggaggcccagagcttttagaagcagggcaggccactgctctttcaaaggaggagggaggcagagggctgatggatcagtgaattttcaactgacaacaagccttgagactcatgggatcgatttgtgctgcagcgaggccctgcctgcctcatcaggtgtggtgagcccatcctatctcactcggaaggggccaaaatcagatctgaaggggagtccggagaacacagcagacgtcctgaagctccccctccctcggtggaagtctgctcaaggaggtcctgaggacaggactcctgggagtttcgtgcttggaaaggacccccgtggccccctctcaaacgccacccccaactggaccccggatgcagccaccaccgtggctgcaggaggagactcgctgccgccaagcagcggtggactaatttaaaggggttgcagcctgagcagcctcatcctgagcggcctgttttctaggatcaagatgaacacactgcagccgaggacaagagccccacaggagctctttgtcctgcaggagagtagcagacccacgtcagagaagatggttgtatcttttcacagctcttctctgagaaatgaagccacaccacgatacagtctggaagaggaagccgggaatgggagatggcaacaatccctgtcactggaacgctggcctctctggacaagccacccttttggaaccccacaccttaggccagtggtggtggcacagtgctgtatcctgcctgggctccaggcactggcctctgctctgtcctccctcttgctgtgcctcccctgtttctcaggggcctggatgcctctcgctctggccaaatgtcttcaacgaagatgactgcctagtccgtcagggagacacttcctggagatccgtgtcatgattgcttcctctccaaacgtgtttctgcttgattggggaggtctcatgaccctggagctcttggcttccatacgtgtctcagacagaggagttaccttcttctccacgtttcccctcatgggtgggtggattgcctagaaggagcgctaggcgaccatgactggccttgtctcctaggacaagtggtgtcgcgtttcctctgcacttcctgtctcattcttgagggacatcctctcctctgctcctgggtgggctgactcccttgatcttctggcccaaacgaatgtcagggaaccaaagggactgggctgtggctggggctggggctgggtgcaggggaaattgtgtcagggctaccagggcggtggagggttgggggtggggcgaattttgcagaaacctctttgctcctctggtaggcatttgaaaatgtggcttgggtcaggcccaggcccacccaacccccgggtcccaggtgttctgtgattttccttggcattgaaggaaaagtctcttgttccccccttccacaggcacatgcctggactccaccgtttgtttcgccgtcaccccatatgcctccggtgacacacattcacaccatctgctgtgggatacgccagtgccacgcgtggtctcatggtctccacctcggattcacccctcttcctgtttgtagatgtcctgtaaagcgcggtgggctttccagagccccagggctttgagaagaaggaaaggccactgctctttcaaaggaggagggaggcagagggctgatggatcagtgaattttcagctgacgctacgccttgagatctatgggatcattctgtgctgcagcgagaccctgcctgcctcaccagatgtggtgagcccatcctatctcactcggatgggcccaaatctgatctgaaggggagtcccgagaacagagcaggcgtcctgaagctccggctccctcgttggaagtcggctcaaggaaatcctgaggacaggactcctgggggtttggccctgggacaggacaccctcggccccctctcccacgccgccccaatctggaccccggatccagctgccgccagggctgcaggaggagcctcgctgtcgctgccactgctgcgcggaggcgttacttaaaggggacgcagcctgactgccaggagcagagggcgagtcagagcagccaatgcgcatgcgcgaggcacaagcggtttctcccgtcacaatgcttcccgccgttgtcttagaaaccagtccctgaggcttggcagagcaggagccctccgtggcagtgcttgggtgtcggggctctgaggctctggcctgacctctccacggggtcgacgggaacgtctccggatgccaggggtcgcaaagggccgaccaggttgaggaaaccccaggaggagtccgcgggaagcagcatggcatcccagcctcaggcctgcccagacggtgttggggtgagtctccccaaaagtcatgccgccgtggtctcgaggacaggtcggcctgcgtgccactgggctgctctgtcacccgagggtcgttctcgtggaaagcagaacccggcagcctcaggggttgcctgggggtgtgtgtttcaatgcctctgctctatgatcctgtgtgtgtgtctgtgtgtgtgtgtgagtgtgtgtgtgtgagtgtgtgtgtgtgagtgtgtgtgtgtgtgtgtgtctgccattctcttttctctctttgtctctcggtctctgtgtgtttctttccctctctctgtcagtctgcatgtatgtctctggccgaatgcgccctgtgcgccacagagcgatttctcgcatgtcggcctgtctttggtgagcctctttctgagtctctgcctgggtcgtgcagccggttgtcaatcgtcttcgccgccgcggacccgctttgggtgtgtgaaggcctggcccatgtgaggagatgcatcggtcccggagcaattgaaatctcatccccatcctgagcggcatcttttctaggatcaagatgaacacactgcagccgaggacaagagccccacaggagctctttgtcctgcaggagaggagcggacccaagtcagagaagatggttgtatctttcacgggctcttctctgagaaatgaagccacaccacgatacagtctgaaagaggaagccgggaatgaagacggcaacagtccctgtcactgaaccactggcctctctggagaatccagccttttggaacccctccccctattcccgtggcggtgtcacggtgctgtatcctgcctgggctccaggctccggcctctgctctcttctccctctgctatttcctctcctgtttctcaggggcctggatgcctctcgctctggccaaatgtcttcaacaaacatgactttctagtctgtcagggagacacttcctggagatccgtgtcatgttttcttctctctccaaacgtgtttctgcttgaatggggaagttttgaaacactccttttgtagaatctgctagtggatatttggagctctttgagacattcgatgggatcaagaatatcttcacatagaaactatgcagaagcattctcagaaacttcattgtgatgtgtgcattcaactcacagagtcgaacctttctttcgatagagcagtttcaaaacagtccttttgtcgaatatgcaagtgttcatttggcgcgctttgaggcctatagtggaaaaggaattatctttacataaaaacaagactgaaggtttctcagaaacttctttgtgatgtgtgcattcaactcacagagttgaaccttccttttgagacagcagttttgaaacagtctttttgttggatctgcaagtgggtatttggtgcgatttgaggcctatggtggaaaaagaaatatctttacataaaaactagacagaaacattctcacgaacttctttgtgatgtgtgcattcagctaacagaggaacttttcttttgatagagcacttttgaaacactccttttgtagaatctgatagtggatatttggagatttttgaggcctacgttggaaacggcagtatcttaccagagaaagtagacagaagcattctcagaaagttctttgtgatgtgtgcattcagctcacggagtttaacctttctttggctagagcagtttcgaaacactctttttgtagaatctgcaattgtttatttggagcgctttgagtcctatggtggaaaagaaaatatcttcccattaaaaactagacggaaggattttgagaaacttctttgtgatgtttgcattcaactcacagagttgaacatgtcctttgatagagcagttttgaatcagtctttttgtagaatctgcaaggggatatttggagcgatttgagacctagggtggaaaaggaaatatattcacacaaaaactagagagaataattcttagaaacttctttgtgatgtgtgcattcaactcacagagctgaaactttctttttatagagcagttttgaaacactccttttgtagaatctgctagtggatatttggagctctttgaggccttcgttggaaatgggaatatcatcacataaaaactagacagaagcgttctcagaaactgctttgtgatgtgtgcattcaactcacagaggtgaaactttctgttgatagagcagttttgaaccactctttttgaagtatccgcaagtggacatttgtagctctttgaggcccatggtgaaaaaggaaatatcttcacataaaaactacacagaagcattctcagaaacttttttgtgatgtgtgtattcaactctttcttttgatagagcagttttgaaacactctttttgtagaatctgcaactggacatttggggccctttgaagcctgtggtgaaaaagggaatatcttcacataaaaactacacagaaacattctcataaacttctttgagttgtttgctttcaactcaaagagttgaacattccttttcatagagcagttttgaaacactccttatgtagatttcgcaagtggatatttggactgctttgaggccttcgttggaaacgggatatcttcacaaaaactagacagaaacattcccagaaaatgcgttgcgatgtgtgcattcatctcaaagagctgaacctttcttttgatagagcagttatgaaacaatctttttgtagcatctgcaagtggtcatttggaggactttgaagcctgtgatgaaaatggaaatatcttcacaaaacaactacacagaagcattctcagaaacttctttgtcatgtgtgcattcaactcacagaattgaaccattcttttgatagagcagttttgagacactctttttgtacaatctggaagtggacatttggagggctttgaggcctatggtgaaaaagaaaatatcttaacataaaaactagacagaagcattctcagaaatttatttgtgttatttgctttcaactcacacagttgaacctttcttttgatagagcagttttgaaacactctttttgtagaatttgcaggtggatatttggacctctttgatgccttcgttggaaatgggatatcgtcacaaaaactagacaggagcattctcagaaactattttgtgatgtgtgcattcaactcacagtgttgaagctttcttttgatagagcagttttgaaacacactttttgtagaatctgcaagtggacatttggagcgctttgaagcctgtggtgaaaaaggaaatatcttcacataaaaactacacagaagcattctcagaaacttcttggtgatgtttgctttcaacacacagagtttaacatagcttttcatgagcagttttgaaacactctttttgtggaatctgcaagtggatatttggactgctttggggccttctttggaaaggggatatgttcacaaaaactagacagaagcattcacagaaacttctttgtgatggatgcattcaactcacagagttgaaccgttcttttgatagagcagtttagaaacactctttttgtagaaactgtgagtggacatttggagttctttgaggcctatggtgaaaaggttaaaaactagacagaagcactctcagaaacttctttctgatgtgtgcatttaactcccagagttggacctttctttagatagagcagttttgaaacactccgtttgtagagtatgcaaggggacatttggagtgctaagaggcctacggtgaaaaaggaaatatcttcacctaaaaactacacagaagcattcacagaaacttctttgtgttgtttgctttcaattcacagagttgaacactccttttcatagagcagttttgaaacactctttttgtagaatttgcaagtggatatttggaccgctttgaggccttcattggaaaagggacatcgtcataaaaactagacagaaacattctcagaaactactttctgatgtgtgcattcaactcacagagttgaacctttcttttgatagagcagttttgaaacagtgtttttctagaatctgcaagtggacatttggagtgctttgaggcctatggtgaaaaaggaaacatcttcaaataaaaactagacagaaggattatcagaaacttctttttgatgtgtgcattcaactcacagagttgaacacttcttttgataaagcagtttttaaaaaacctttttgtagaatctgcaactggacatttggatggctttgaggcttatcgtgaaaaaggaaatatcttcacataaaaattacacagaagcattctcagaaacctattcgtgttgtttgctttcaactcactgatttgaacattccatttcatagagcatttttgaaacccgctttttgtagaatttggaagtggatatttggactgctttgaggccttccttggaaaagggatatattcacaaaaaccagacagaagcattctcagaaacttctttgtcatgtgtgcattcaactcacagagttgaacctttcttttgatagagcagttttgaaacactctttttatagaatctgcaagtggacatttggagtgctttgaggcctacggtgaaacaggaaatttcttcacataaaaactagacagaagcattctcagaaacttctttgagatgtgtgcattcaacttacagagttgaaactttcttttgtcagagcagttttgaaacactctttttgtagaatctgcaagtggacatttggaaagctttgaggcctatggtagaaaaggaaatatcttcacataaaatccagacagaagcattctcagaaacttctttgcgatgtttgtatccaactcacagaatttaacatatctttccatagatcagttttgaaacactcttttcttagaatgtgcaagtggatatttggattgctttgaggctttctttggaaacgggaatatctacacataaaaactagacagaaatattctcagaaactccccgtgatgtgtgcattcaactcacagagttgaacctttcttttgatgagcagttttgatacacactttttgtagaatctgcaagtggacatttggagagctttgaggcatatggtggaaaagcaaatatcttcacataaaaactagacagaaacattctcagaaacttctttgtgttgtttgcattcaactcacagagttgaagataccttttcatagagcagatttgaaacactgttttcatagaatctgccagtggatatttggactgctttgaggccttcgttgtaaacgggaatatgttcacataaaaactagacagaagaattctcagaaacttctttctgatgcctgcattcaattcacagagttgaacctttcttttgatggagcagtattgaaacactcattttgcagaatctgcaagtggtcatttggagacctttgaggtccgtggtggaagtaaatatcttcacataaaaattagacagaagcattctcaggaacttctttctgatgctttcattcaactcacagagttcaacataccttttcattgagcagttttgaaacactcttttcgtagaatctgcaagtggacatttggactgctttgaggccatcgttggaaacgggaatatcttcacataaaaactagacagaagcattctcagaaaccactttgtgatgggtgcattcaactcacagagttgaatctttcttttgattgagcggttttgaaacactcattttgtaggatctgcaagtggacatttgcagagctttgaggcctatgttggaaaggaaatatcttcacataataaccagacagaagcattctcagaaacttctttttgatgtgttccttcaactaacagagttgaacataccttttcatagagcagtttcgaaacactcttatccttgtatctgcaagtgcatatttgaactgctttgaggccttcgttggaaacgggaatatcttcatataaaaactagacagaagcattctcagaaacttctttgtgatgtgtgcattcaactcacagatttgaacctttcttttgatacagctgttttgaaacactctttttgtagaatgcacaagtggacatttggagagctttgaggcctacagtggaaaaagaaatattttaacgtaaaaaccagacagaagcattctcagaaatgtctttgtgatgtttgcattcaactcacagagttgaacatactttttcatagaacagttttgagacactcttttcgtagaatctgcaagtggacatttggactgctttgaggccttcgttggaaatgggaatatcttcacataaaaactagacagaagtattctgagaaactactttgtgatgtgtgcattcaactcacagagttgaacctttctttttatagagcagctttgaaacactctttctgtagaatctgcaagtggacatttgagggctttatggcccatggtggaaaaagatatatcttcacatacaaactagacagaagcattctcctatacttctttgtgatgtttgcattcaactaactgtgttgaacatactttttcaaagaacagttttcaaacacctttcgtggaatctgcacgtggatatttggactgctttgaggccttcgttggaaacgggaatatcttcacataaaaaccagacagaagcattctcagaatcttctctttgatgtttgcattcaactcacagagttgaacctttcttttgatacagctgttttgaaacattctttttgtagaatgtgcatgtggacatttggagagctttgaggcctacggtggaaaaggaaatattttaacttaaaaaccagacagaagaattctcagaaattgctttctggtgtttgcatttaactcacagagttgaacatactttttcatagaacagttttgagacactcttttcgtagaatctgcaagtggacatttggacttctttgaagccttcgttggaaatgggaatatcctcccataaaaactagacagaataattctgagaaacagctttgtgatgcgtgcattcgactcacagagttgaacctttcttttaatagagcagttttgaaacactctttttgtagaatctgcaagtggactcttgagattacataatgctagatgatgagttagtgggtgcagcgcaccagcatggcacatgtatacatatgtaactaacctgcacaatgtgcacatgtaccctaaaacttaaagtataataaaaaaaaaaagaaaggnnnnnnnnnnnnnnnnnnnnnnnnnnnnnnnnnnnnnnnnnnnnnnnnnnnnnnnnnnnnnnnnnnnnnnnnnnnnnnnnnnnnnnnnnnnnnnnnnnnnnnnnnnnnnnnnnnnnnnnnnnnnnnnnnnnnnnnnnnnnnnnnnnnnnnnnnnnnnnnnnnnnnnnnnnnnnnnnnnnnnnnnnnnnnnnnnnnnnnnnnnnnnnnnnnnnnnnnnnnnnnnnnnnnnnnnnnnnnnnnnnnnnnnnnnnnnnnnnnnnnnnnnnngttgttcatctctgtgagttgaatgcaatcattcaaagaagtttctgagaatgctgcactctggtttttaagtgaagatatttccttttccatcataggcctcaaaatttgaaaacgtccacttgcagagtctacaaaaacagtgtttcaaaactactctatcaaaagaaaggttcaactctgtgagttgaatgcacacatcacaaagaagtttctgagaatgcttctgtctaggttttatgtgaagatattcccatttccaacgaaggcctcaaagcagtccaaatatccacttgcagattctacttaaagagtgtttcaatcccgctcaatgaaaaggtatattcaactctatgagttgaatgcacacatcacaaagaagtttctgagatttcttctgtctagtttttttttttttttttaagatattcccatttccgacaaaggtctcaaagcagtccaaatatccacttgcagattctacgaaaagagtgtttcaaaacttctctatgaaaatgtattttcaagtctgtgagttgaatgcacacatcacaaagaagtttctgagaatgcttctgtctagttcttatgtgagtatatttccttttccaccataggcctcaaagctctccgaatgtccacttgcagattccacaaaaagagtgtttcaaaaatgctctatcaaaagaaaggttcaactctgtgagttgaatgcacatatcacaaagaagtttctgagaatgcttctgtctagtttttatgtgaagatattcccatttccctcgaaggactcaaagcagtccaaatatccacctgcagattctacgaaaatagtgcttcataactgctctatgagcagatatgttcaaatctatgtgttgaaggcaaacatcacaaagaagtttctgagaaggcttctgtctattttttatgtgaagatatttccttccctaccgttggcttcaaagctctccaaatgtccacttgcagatcctacaaaaagagtgtttcaaaactgctctatcaaaagaaatgttcaactctgagagttatatgcaaacatcaaaaggcgtttctgagaatgcttctgtctagtttttatgtgaaagttttcccgttgtcaacgaaggactcaaagcagtccaaatatccagtggcagattctacgaaaatactgtttcaaaactgctctatgagaaggtatgttcaactctgtgagttgaacgcaaacatcacaaagaagtttctgagaatgcttccatctggtttttatgtgaagatatttccttttccaccataggcctcaaagttttccaaatgtccactttgcagattctaccaaaagtgtgtttcaaaactgctctatcaaaagaaagtttgaactctgtgagttgactgcaaacgtcacgaagaagtttctgagagtgcttctgtctagtttttatgtgaactttttccaatttccaacgacggcctcaaagcagtccaaatatacacatgcagattcttcaaaaagagtgtttcaaaactgctctattaaaaggtatgttcgactctgtgagttaagtgcaaacatcacaaagaagtttctgagactgcttctgtctagtttttatgtgaagatatatcattttccaccataggactcaaagctttccaaatgtccacttgcggattctacaaaaagagagtttcaaaacagctctatcaaaagaaaggttgaaatctgtgagttgaatgcacacatcacaaagaagttgccgagaatgcttctgtctacggttaatgtgaagatattcccgtttccaaagaaggcctcaaaacagtctaaatatccacttgcagattttatgaaaagtgtttttcaaaactgctttaagaaaaggtttgtgcacctctgtgagttgaatgcacacatcacaaaaaagtttctgagaatccttctgtctagtttctatttgaagacattcccgtttgaagcgaaggccacaaagcagtccaaatatcgacttgcagattctacgaaaacagtgtttcaaaactgctctatgaaaaggttatgttcaactgtgtgagttgaaagcacacatcacaaaaatgtttctgagaatgcttctatcttgtttttatgtgaagatattaacttttccaacaaaggccccaaagcagtccaaatatccacttacacattctacaaaaagagtgtttcaaaattgctctatgaaaaggtatgttcaactctgtgagttgaatgcacacgtcacaaagaagtttctgagaatgcttctgtcttgttttttttgtgaagatattctcgtttccgacgaatacctcaaagcagtccaaatatccacttgcagattctacgaaaagagtgtttaaaaacttctctatgaaaacgtatgtttaacactgtgagttgaatgcacacataacaaagaagtttctgagaatgcttatgtctagtttttatgtgaagatattcccgtttccaaataaggcttcaaagcagtcaaaatagccacatgcagattttacaaaaacagtattacaaatctgctctatgaaaagatatgttcaactcattgagttgaatgcagtcatcaaaaagaagtttctgagaatgcttctgactagtttttatgtgaatatatttccttttccaccgtaggcctcaaagttctcgaaatgtgcacttgcagattctaccaacagagtgtttcaaagctgctctatcaaaagaaatgttcaactctgtgagttgaatgcacacatcacaatgaagtttctgagaatgcttctgtctagtttttatgtgaagatattcccatttccaacaaaggcgtcaaggcagtccaaatatgcatttgcagattcttcgaaaagagggtttcaaaactgctctatgaaaagttatgttcaactctgttagttgaatgtaaacatcacaaagaagtttatgagaatgcatctgcctcggttttctgtgaagatatttccttttcaaccattggcctcaaagctttccaaaactcccccgcagattctacaaaaagagtgcctcaaagctgctctatcaaagaaaggttcaaatctgcgcgttgaggcgcatatcacaaagtactttctgagaatgcttctgtctagtttttatgtgaagatattcccgtttccaacaaaggcctcaaagcagtcaaaatatacacttgcagattctacaaaaagagtgttttaaaactgctctatgaaaaggtatgttcaacactctgagttgaatgcaaacatcacaaagaagtttcagggaatgcttctgtctagtttttatgtgatgacatttccttttccaccataggcctcaaatatctccaaaagtccactttcagattctacaaaaagagtgtttcaaaaatgctgtatcaaaagaaaggttcaactctgagtttaatgcacacatcaaaaagaacttcctgagaatgcttctgtcgagcttttatgtaaagatattcccatttccaacgaaggcctcaaagcagtccaaatatccaattgcagattctacgaaaagagtatatcaaaactgctctatgaaaaggtgtgttcaactctgtgagttgaatgcaaacatcacaaagaagtttctgagaatgcttctgtctaattttgacgtgaagttaattccttttccaccataggcctcaaagctctccaaatgtccacttgaagacaccacaaaaagagtgtttgaaaactgctctatcaaaggaaatgttcaactatgtgattagaaatcacacattacaaataagtttctcagaatgcttctgtctagtttatatgagaagatattcccgtttccaatgaaggcctcaaagcagtccaaatatccacctgcagattctacgaaaagagtgtttcaaatctgctctatcataagaaaggttcaaattggtgagttgaatgcagacatcacaaagaagtttcggagaatgcttctgtcaagttttcatgtgagtatattcccgtttccaatgaaggcctaaaagcagtcaaaatatccacttgcagattctacgaaaagaatgtttcaaaactgctctattaaaaggtatgttcaactctgtgagttgaatgcaaacatcacaaaaacgtttctgagactgcttatgtccagtttttatgtgaagatatttccttttacaccataggcttcaaagttttccaaatgtccacttgcagatactacaaaaggtgtgtttcaaaactgctctatcaaaagaaaggttgaactctgtcagctgaatgcacacatcacaaagaagtttctgagaatgcttatgtcttgtttttatgtgaagatattcccttttctaacgaaggcctcaaagcagtccaaatatccaattgcacatgttaggaaaatagtgtttcaaaattgctctatgaaaaggtaatttcaactctgtgagttcaatgcaaacatcacaaagaagtttctaagaatgcttctgtctagtttttatgggaatatatttccttttccaccgtaggtctcaaagctctcctaatgtccacttgcagatactacaaaaagattgtttcaaaactgctctatcaaaagaaaggttcaactctgtgagttgaaaacacacttcacaaagaagtttctgagaatgcttttgtctgttttttatgtgaatatgttcccatttctaacaaaatcctcgaagcagtccaaataaccacttgaagattctatgacaagagtgtttcaaaattgctctatgaaaaggtaatttcaactctgtgagttgaatgcaaacatcacaaagaagtttctgagaatgcttctgtctggtttttatgtgaagatatttccttttccaccataggcctcaaagctctccaaatgtccacttgcagattctacaaaaagggtgtttcaaaactgctctaccaaaagaaattttcaactctttgagttgaatacacacatcacaaagtagattctgagaatgcttctgtctagtttttatgtgtagatattcccgtttccaacgacggcctcaaagcagtccaaatatccacttgcagattctatgaaaagagtgtttcaaacctcctctatgaaaaggtatgttcaaatctgtgagttgaatgcaaacattacaaagatgtttctgagaatgcttctgtctagtttttatgtgaagatatttccttttccaccgtaggccttaaagctctccaaatgtccacttgcagattctacaaaaagagagtttcaaaactgctccgtcaaaagaaatgttcaacactgagagttgaatgcacacatcacaaaggagtttctgaaaatgcttctgtctagttttttgtaaagatattcccatttccaacgatgacctcaaagcagtccaaatatgcacttgcagattcaatgaaaagagtgtttcagaactgctctatgaaaaggtatgttcaaccctgtgttgaacgtaaacatcacaaagaagtttctgaaaatgcttctgtctagttcttatgtgaagatatttccttttcagccataggcctcaaagctctccaaatgtccacttgcagattccacaaaaagagtgtttcaaaactgttatattaaaagaaaggttcgactttgtgagttgagtgcacacattacaaagaagtttctgagaatgcttctctagttttaatgtgaagatattcccgtttccaatgaagacctcaaaggagtccaaatatccacttgcagattctacaaaaagagtgtttcaaaacttctttatgaaaaggtatgttcaactccgtgtgttgaatgcacacatcacaaagaagtttctgagaatgcttctctctagtttttatgtgaagatattcccgtttccaacgaatgcctcaaagcagtccaaacatccacatgcagattctacgaaaagagtgtttgaaaactgctctatgaacaggtatgttcaactctgtgagttgaattcaaacatcaaaagaagtttctgagaatgcttctgactagtatttctgtgaagatatttgcttttctaccataggcctcaaaactcttcaaatgtccacttgcagatactacaaaaagagtgtttcaaaactgctttatcagaagaaaaattcaactccgtgagttgaatgcagatatcacaaggaagtatctgcaaatgcttctctctagtttttatgtgaagacatttccttttccaccatagttctcaaagctccccaaatgtccacttgcagattctacgaagagtgtttcaaaactgctttatgaaagatatattcaactttgtgagttgaatgcaaacatcactacaaagtttctgagaattattctgtctgttttttatgcgtagatatttccttttccaccattgtcctcaaagttctccaaatatccacctgcagattctacaaaaagagtatttcaaaactgctctatcaaaagaaagtttcaactctgtgagttgaatgcacacatcacaaagaaatttctgagcatactgttgtctagcttttatgtgaagatattcccatttccaatgaaggcctcaaaacagtccaaatatccacttgcagattttgcgaaaagagtgtgtcaaaaccgctctatgaaaaggcatgttcaactctgtgagttgaatgcaaacatcaaaaagaagtttctgagaatgcttcggtctggtttttatgtgaagatatttccttttccaccacaggcctcaaagctatccaaatgtccccttgcagatcctacaaaaagagtgtttcaaaactgctctatcaattggaagggtcaactctgtgagttgactgcacatatcacaaagaagtttttgagaatgcttctgtctagtttttatgtgaagatattcccgtttccaaggaaggcctcaaagcagtcctaatatccacttgcagattctacgaaaagagtgtttcaaaacttctgtatgaaaagatatgttcaacactgtgagtcgaattcagccatcacaaagtagtttctgagaatgcttctgtctagtttttatgtgaagatatttcctttccaccataggcctcaaagctctccaaatgtccccttgcagatcgtacaaaaagagtgtttcaaaactgctctatcaatggaagggtcaactctgtgagttgactgcacatatcacaaagaagtttttgagaatgcttctgtctagtttttatgtgaagatattcccgtttccaaggaaggcctcaaagcagtcctaatatccacttgcagattctacgaaaagagtgtttcaaaacttctgtatgaaaaggtatgttcaacactgtgagtcgaattcagccatcacaaagtagtttctgagaatgcttctgtctagtttttatgtgaagatatttcctttccaccataggcctcaaagctctccaaatatccacttgcagattctacaaaatgagtgtttcaaaactgctctattaaaaggtatgttcaactctgtgagttgaacgcaaacatcacaaagaagtttctgagaatgcttctgtttagtttttatgtgatgatatttccttttccaccatgggcctcaaagctatctaaatgtgccctggcagattctacaaaaagagtgtttcaaaactgctctatcaaaagaaagattcaactctgtgacttgaatgcacacatcacaaagacttttctgagaatgcttcggtctagtttttatgtgaaggtattcccgtttacaacgtaggcctcaaaggggtccaaatatctacttgcagattctgcgaaaagagtgtttcaaaactgctctatggaaaggtatgttcaactttgtgagttgaatgcaaacattacaaagaagtttctgagaatccttctgtctagtttttatgtgtagatatttcctttccaccgttggtctcaaagctctccaaaagtccacctgcagattctaaaaaaatagtgtttcaaaactgctctatcaaaaggaatgttcaaatctgctagctgaatgcacacatctagaagaagtttctcagaatacttctgtctagtttttatttgaagatatttccgtttccatagaaggcctcaaagcagtcaaattatgcatttcaaaatggctctatgaaaacgtgtgttaaactctgtgagttgaatgcacacatcacaaagaagtttctcagaatgcttctgtctagtttttatgtgaagatattcccttttccgacgatgcctcaaagcagtccaaatatccacttgcagattatacaaaaacagtgtttccaaactgctctaacataagaaaggttcaaatctgtgagttgaatgcaaacaacaaaaagaagtttctgagaatgcttctgtctagtttttatatgaggatattcccgtttccaacgaatgcttaaaagcagtaaaaatatccatttgcagattctacgaaaagagtgtctcaaaactgctctaagaaaaggtatgctcaactctgtgagtttaatgcaaacatcacaaagtagtttctgagaatgcttttgtctagtagttatgtgaagttatttctttttccaccaaaggtctcaaagcttttcaaatgtcctctggcagattctacaaaaagagtgtttcaaaactgctctatcagaagaaaggttcaacattgtgagtcaaatgacacacatcacaaagaagtttcttagaatgcttctgtctagttttaatgtgaagatattaccgtttccaacgaaggcctcatagcagtacagatatccacttgtagattcaacaaaaaattttttcaaatgtgctctatgaatatgcattttcaactctgtgtgtttacggcaaacatcaaaaagaagtttctgagaaagcttctgtctactttatatgtgaagatatttccttttccaccataggcctcaaagctctccaaatgtccactggcagattctacaaaaagagtgtttcaaaactgctctgtcaaaagaaaggttcaactctgtgagttgaatgcacacatcacaaagaggtttctcagaatgcttctgtctagtttttatgtgaatatattcccgtttccaacgaaagcctcaaagcagtccaaatattcacttgcagattctacgaaaagagtgtttcaaaactgctctatgaaaaggtatgttcaaccttgtgagttgaatgcaaccatcacaaagaaggttctgacaatgcttctgtctagtatttatgtgaagatagttcatttttcatcataggcctcaaagctttcaaaatgtccacttgcagattctacaaaaagagtgttccaaaattgctctattaaaagaaaggttcaactctgtgagttgaatgcacacatcacaaagaagactctctgagaatgcttctgtctggtttttttgtgaagatattcccatttccaacgaaggcctaaacagaacaaatatccacttgcagaaactacgaaaagagtgtttataaactgctctataaaaaggtatgttcaactcagtgagttgaatgcaaacatcaaaaacaagtttctgagaatgcttctgtcaagtttttatgtgaagatatttccttttccaccatagtcctcaatgcactccaaatgtccaattgtagattcaacaaaaagagtgcttcaaaactgctctgccaatcaaaggttcaactctgtcaattgaatgcacacatcagaaagaagtttctgagaatgcttctatctagtttttgtgaagctattcccgtttccaatgaaggcctaaaagcagtcctaatatccacttgcagattgtacgaatagagtttttcaagactgctctatgaaaaggtatgttcaactctgtgagttgaatgcaaacatcacaaagtagtttctgagaatgcttctgtctagtttttatgtgaatatattcccgtttgcaaaaaaggcctcaaagcagttgaaatatccactttcagatcctacgaaaagagtgtttcaaaactgatctatgaaaaggtatgttcaactatgtgagttgaatgcaaacatcacaaagatggttctgagaaggcttctgtctagtttttatgtgaagatatttccttttccaccgcaggccttaaagctcttcaaatgtccacttgcagaccctacaaaaacagtgtttcaaagctgctctatcaaaagagaggttcaaccatgtgagttgaattcacacatcacaaagaagtttctgagaattcttctttctagtttttatgtgaacatattcccgtttccaaagaaggcctcaaagcagtacaaatatgcacttgcagattctacgaatagagtgtttcataactgctctatgaaaacgtatgttcaactctgtgagttgaatgcaaacatcataaagaattttctgaaaatgcttctgtctgtttttttgatgaaaatatttccttttccaccatacgcctttaagctatcaaaatgtccacttgcagattctgcaaaaagagtgtttcaaaactgctcaatgaaaaggtacgttcaactctgtgagttgaaagcaaacatcacaaagaaggttctgagaatgcttctgtctagtttttatgtgaaggtatttcctttcccaccacaggccttaaagctctcaaaatgtccacttgcagatcctacagaaactgtgtttgaaaactgctctatcaaaagaaaggttcaactctcagttgaatgcacacatcacaaagaagtttctgagaatacttctgtctagtttttatatgaagatattcccgtttccaacggaggcctaaaagcagtaaaaatatccactggcagaacctacgaaaagagtgtttctaaactgcactttgaaaagttatattcaactctgtgagttgaatacaaacatcacaaagaaggttctgagaatgcttctgtcaagttttcatgtgaagatgtttcctttcccaccacaggtcttaaagatctcgaaatatccacttgaagatcctacagaaacagtgtttgaaaactgctctatcaaaagaaaggttcaactctgttagttgaatgcactcatcacaatgaagtttctgagaatgcttctatctagtttttatgtgaagatatttcatttccaccataggcctcaatggattccaaatgtccacttgcagatactacaaaaagattgtttcaaaactgctctatctaaagaaaggttcaactctgtgagttgaatgcacacatcacaaagtagtttttgagaatgcttctatctagttattatgtgtagatattcccgtttccaacgaaggcctcaaagcagtccaaatatccactggcagattatacaaaaagagtgtttcaaaactgctctatgaggaggaattttcaactctgtgagttgaatgcaaacatcgcaaagaagcttctgagaatgcttctgtcttgtttctttgtgaagatatttccttttccaccattgacctcaaagctttacaaatgtccacttgcagattctacaaaaagagtgtttaaaaactgctctatcaaaagaaagatacaactctgtgagttgaatgcacacatcacaaagaagtttctgagaatgcttctgtctagtttttatgtgaagatattcccgtttccaacgaaggcctccaagcagtccaaatatccactttcagattctacgaaaagagagtttcaaacagctctatgaagcggtatgttcaacactgtgtgttgaatacaaacatcacaaagaaggttctgagaatgcttctgtccagtttttatgtgaacatatttccttttccaccatagacctcaatgctctccaaatgtccacttgcagattctacaaaaagagagtttctaaactgctctatcagaggaaaggttcaactccgtgagctgaatgcacacatcacaaagaagttcatgagattgcttctgtctagtttttatttgaagatatacccgtttctgtcggaggcctcaaagcagtcaaaaatatccacttacagatactacaaaaagagtgtttcaaaactgctctacgaaaaggtatactcctttgtgtatactctgtaatgtttgcatacaactccatgagttatatgcaaacattacagagaagtttctgagaatgcttctttctactttttatgtgaagatatttccttttccaccaaaggcctcaaagctcttcaaatgtccacttgcagactctacaaaaagagtgtttgaaaactgctctataaaaagaaaggttcaactccatgagttgagtgcacacatcacaaagaagtttctgagaatggttctatctagtttttatgtgaagatatttccttttccaccataggcctcaaagcactccaaatgtccacttgtagattctataaaaagagtgtttcaaaacttctctatcaaaagaaatgataaattctgtgagatgaatacacacattcctaagaagtttctgagaatgcttctatctactttttatgtgtagatattctcatttccaatgaaggcctcaaagccgtccaaatatccactggcagattctacaaaaagagtgtttcaaaactgctgtattaagaagtactttcagctctgtgagttgaatgcaaatattgcaaagaaatttctcaaaatgcttctgtctggtttttatgtgaagatatttcctgttccaccacaggcctcaaagctttccaaatgtccactggcagatactaaaaaaatagtgtttcaaaactactctataagaagaaaagttcacctctgtgattcgaatgcacacatcacaaagaattttttgagaatgcttctgtctagtttttatgtgaagatatacccgtttccaatgaaggcctcaaagcagtccaaatatccacttgcagattctatgaaaagagtgtttcaaaactgctctatgaaaaggtatgttttactctgtgagttgaatgcaaccatcatgaagaatttcctgagaattcttctgtctaccttttatgtgaagatatttccttttccaccatagacctcaaagcccttcaaatgtccacttacagattctacaaaaagagtgtttcaaaagtgctcgatcaaaagaaagattcaaatctgtgagatgaatgcaaacatcactaagaagtttctgataatgcttctgtctagtttttatgtgaagatattcccgtttccaacgaagacctcaaagcagttcaaatatacacttgcagattgtacgaaaagagtgttttcaaaactgctctatgaaaaggtatgttcaactctgtgagttgaatgcaaacagaatgcttctgtctagtttttatgtgaagatatttccttttctaccataggtctcaaagctctccaaatgtgcacttgcagattctacaaaaagagtgtttcaaaactgctctgtaaaaagaaaggttaaactctgtgagtagaatgcacacataacaaagaagtttctgagaatgcttctgtctagtttttatatgaagttattcccttttccaatgaaggcctcaaagcagtccaaatatccacttgcagattctacaaaaagagtgtttcaagactgctctatcaaaataaagtttcaacccgctgagttgaatgcacacatcataaagaagtttcttagaatgcttctgtctagtttttacgtgaatatattcccgtttccaatgaaggcctcaaagcagtccaaatattcacttgcagattctacgaaaagagtgtttcaaaactgctctctgaaaacgtatgttcaactctgtgagttgaatgcaaatgtcaaaaagtagtttccgagaatgcttctttcaagtttttatgtgaagttatttcctttcaaccataagactcaaagctctccaaatatccactgcagattctgcaaaatgagtggttcaaaactgctctatcaaaagaaaagttcaaaattgttagttgaatgcagacatcacaaagtagtttgtgagcatgcttccgtctagtttttatatgtagatattcccgtttccaacaaagtactcaaagcagtccaaatatccacttgcagattccatgaaaagtgtctttcaaaactgctctaaaaaaagttatgttcaaatctgtgagttgaatgtaaacacagcgaaatttctgagaatgcttctgtctactttttatgtgaatatatttccgtttccgccaaaatgttcacttcttgattctacaaaaagagtgtttcaaaacttgtctatcaaaagaaaggttaaactctgcgattttaatgcacacatcacaaagaagtttctgagaaagcttctgtctagtttttatgtgaagatattcccgtttccaacgaaggcctcaaagcagtccatatatccacttgtagattctatgaaaagcgtgtttcaaaacagctgtatgaaaaggcatattcaactccatgagttgaatgcaaacatcacaaaaatgtttctgagaatgcttatgtctggtttttatatgaagatatttccttttccaccatacgccacaaatctttccaaatgttcacttgcatattctacagaaagagtgtttcaaaacttctctatcaaaagagaggtcaattctgtgattttaatacacacatcacaaagaagtttctgagaaagcttctgtctagtttttatgtgaagatattccgtttccaatgaaggcctcaaagcagtccaaatatccacttgcagattctatgaaaagagtgtttccaaactgctctatgaaaaggtatgttcaactctgtgagttgaatgaaaacatcacaaggaagtctctgagaatgcttctttctagtttttatgtgaagatatttcctttcaaccataggcctcaaagctctgcaaatgtccactgcagattctacaaaatgagtggttcaaaactgctctaccaaaagaaagattcaactctgtgagttgaatgcacacatcacaaaaaagtttctgagcatggctctgtctagtttttgtacgtagatattcccgtttccaaagaagtcttcaaagcagtccaaatattcacttgcagattctacgaatagagtgtttcaaaactgctctatcaaaagaaagtttcaactctctgagttgaatgcatacatcacaacgaagtttctgagcatgcctctgtctagtttttgtacgtagatattcccgtttccaaagaagtcctcaaagcagtccaaatattcacttgcagattctacgaatagagtgtttcaaaactgctctatcaaaagaaagtttcaactctctgagttgaatgcatacatcacaacgaagtttctgagaatgcttctgtgtagtttttatgtgaagatattcccgtttccagcaaaggcctcaaagcagtacaaatatccacttgcagattctacaaaaagagtgtttcaaaactgctccataaaaaagtaagttaaatgctgtgagtttaatgcaaacatcacaaagaagtttcagagaatgcttctgtctaatttttatgtgaagatatttccttttccaccataagcctcaaagctctccaaatgtacaattgcagattctacaaaaatattgtttcaaaactgctctatcaaaacaaaggttcaactctgtgagttgaatgcaaacatcacaaagaagtttctgagaatgcttctgtctgatttttatatgaagatatttccatttccaccttaggcctcaaagctttcaaaatgtccacttgcagatactacaaaaagagtgtttcaaaactgatctatcaaaagaaaggttcaactctgtgagttgaatgcacacatcacaaagaagtttctgagaatgcttctgtctaatttttatgtgaagatattcccgattacaatgaaggcctcaatgaattctaaatatccacttgcagatgctacgaaaagagagtttgaaaactgctctatgaaaaggtatgttcaagtctgtgaggtgaatgcaaacatcacaaagtaggttctgagaatgcttatgtctagttttcatgtgaagatatttacttttccactatagccctcaaacctctccaaatgtccacttgcagatcctaagaaaaaagtgattcaaaacagctctatgaagaagtatggtcaaatctttgaattgaatgcaaatatcagaaagaagtttcggagaatgcttctgtctattttttatgtgaagatattttcttttccaacgtagtcctcaaagctttcaaaacgtctattgcagattctacaaaaagagtgtttcaaaactgctccatgaaaagctatgttcaactctgtgaattgaatgcacacatcacaaagaagtttcagagaatgcttctgtctagtttttatgtagatattcctgtttccaacgaaggcctcaaagcagtccaaataaccacttgcagattctacggaaagagtttttcaaaactgctctatgaaaaggtatgttgaattctgtgagttgaatgcaaacatgacaaagaagtttctgagaatgcttctgtctggtttttatgtgaatctatttcctttccaccataagcctcaaagctctacaaatgcccattgcagattctacaaaatgagtgtttcaaaactgctctatcaaaagaaagtttcaactctgtgagttgaatgcacaaatcacaagtttctgagaatgcttctgtctagtttttatgtagatattcctgtttccaacgaaggcctcaaagcagtccaaataaccacttgcagtttctatgaaaagagtttttcaaaactgctctatgaaaaggtatgttgaattctgtgagttgaatgcaaacatgacaaagaagtttctgagaatgcttctgtctggtttttatgtgaatctatttcctttccaccataggcctcaaagctctacaaatgcccattgcagattctacaaaatgagtgtttcaaaactgctctatcaaaagaaagtttcaactctgtgagttgaatgcacaaatcacaagtttctgagaatgcttctgtctagtttttatgtgaagatattcttgtttccaacgaaggcctcaaagcagtccaaatatccactggcagattccacgaaaagagtgtttcaaagctgctgtatgaaaaggtatgttcaactctgtgagttgaatgcaagcatcagaaagaagtttctgtgaatgcttctgtctaatttatatgtgaagatatttacttccaccataggcctcaaagctctccaaatgaccacttgtagattctgcaaaatgagtgtttcaaaactgctctatcaaaagaaaggttcaactccgtgagttgaatacacacatcacaaagaagtttctgagaatgcttctttctagtttttatgtgaagatatttccttttccaccataagcctcaaagcattccaaatgtccacttgcagattctacaaaaagagtgtttcaaaactgctctatcaaaagaaagtttcaaatctatgagttgaatgcacacatcacaaagaagtttctcagaatgcttctatctagtttttaagtgaagatattcccatttcaaatgaaggcgtcaaagcagtccaaatatccacttgcagattccacgaaaagagtgtttcaaaactgctctgtgaaaaggtatatttaacgctgtcggttgaatgcaaacatcacaaagaaatttctgtgaatgcttctgtctagtttttgtgaatatatttcgttttccaccaaagtcctcacagctctcctaaagtctacttgcagattctacaaaaagtgtgtttcaaaactgctccattaaaataaactttcaaatctgtgagttcaatgtacacatcacaaagaagtttctgataatgcttctgtctagtttttatgtgaagatattctcgtttccaacgaaggcctcaaagcagtaaaaatatccacttgcagattctacgaaaagattgtttcaaaactgctccatgaaaaggcatgttcagctctgtgagttgaatgcagacatcataaaaatttctgagaatgcttctgtctaattattatgtgaagatatttcctttccaccgtatgcctcaaagctctccaaatgtccacttgtagaatattcaaaaacattgtttcaaaactactctatcaaaagataggctcaactctgtgagttgaatgcagacatcacaaagaagtttctgagaatgcttctgtgtagtttttatgtgaagatattcccatttccaacgaaggcctcaatgccatcaaaatatccacttgcagattctacgaaaagaatgtttcaaaactgctctatgaaaacgtaagttcacctctgtgttttgaaggcaaagatcacaaagaagtttctgagaatgcttctatctggattttatgtgaagatattttcttttctaccataggtctcaaagttttccaaatgtccacttgcagattctacaaaaagagtgtttcaaaactgctctaacaaaagaaagtttcaactctgtaagttgaatccacacatctcaaagaagtttgtgagaatgggtctgtctagttcttatgggtagatattcccgtttccaacgaaggcctcaaagcagtccaaatatccactagcagattctgcgaaaagagtgtttcaaaactgctctatgaaaagctatgttcaaatctgtgatttgaatgcaaacatcacaaagaagtttcagagaatgcttctgtcttgttttcatgtgaatatatttccttttccaccataggcctcgaagctctccaaatgtccacttgcacatactacaaaaagaatgtttcaaaactgctctatcataggaaaggttcaactctgtgaattgaatgcacatatcacaaagaagtttctcagaattcttctgtctagtttttatgtgaagatattcccatttccaacaaaggcctcaaaacagtctaaatacccccttgcagatactgcgaaaagagtgtttcaaaactgctctgtgaaaaggtatgctcaactctgtgagttgattgcaaacatcacacagcagtttctgagaatgcttctgtctggttttcatttgtagatatttccttttccacgataggtctcaaagctctccaaatgtccaattgcagatactggaaaatgagagtttcaaaactgttctatcaaaagaaaggttcaactgtctgcgttgaatgcacacatcacaaggaagtttctgagaatgcttctgtctagtttttatgtaaagatattctcttttacaacaaacacctcaaacagtccaaatatccaattgcagattctacgaaaagagagtttcaaaactgctctatgaaaaggtatgtttaacgctgtcggttgaatgcaaacatcacaaagaaacttctgtgaatgcttctgtctagtttttatgaatatatttcattttccaccaaagtcctcacagctctcctaaagtccacttgcagattctacagaaagagtgtttcaaaactgctccattaaaagaaagtttcaactctgtgggttcaatgcacacgtcacaaagaagtttcttagaatgcttctaatttttaattgaagttattcccttttttaaagaaggcctaaaagaagttcaaatatccacttgcagatcctacgaaaagagtgtttcaaaactgttctataaaaaagtatgttcaactccgtgagttgaatggaaacatcacaaataagtttctgagaatgcttctgtctggtttttatgtgaagatatttcattttccacaataggcctcaaagttctccaaatatccactagcagatcctacaaaaagagtgtttcaaaactgctctatgaaaagaaaggttcaactctgtgatttgaatgcacacatcacaaagaagtttctgagaatgcttctgtctagtttttatgtgaagattttcccatttccatagaaggtctcaaagcagtcaaaatatcgacttgcagattctacgagaagagtgtttcaaaactcctccatgaaaagttatgttcaactctgtgatttgaatgcacacatcacaaagaagtttctttgaatgcttctttctggtttttatatgaagatattttcttttcaaccacaggcctccaagctttccaaatgtccacttgcagattctacaaaaagggtgtttcaaaactgctctaaaaaaaagttcaaatctgtgagttgaatgcacgcattacaaagaaatttctgagaatgcttctgtctagttttcatgtgaagatattcccgttttcaacgaaggcctcaaagctgtaaaaatatcctcttgaaggttctacgaaaagagcgtttcaaaactgctctatgaaaaggtaagttcaactctgtaagtagaatgcaaacctcacaaagaagtttctgagaatgcttctgtctgtttttatgtgaagatatttccttttccacgatgggcctcaaagctctccaaatgtacacttgcaggttctacaaaaagtgtgtttcaaaagagctctgtcaaaagaaaggttcagctctctgagttgaatgcacacatcacaaagaagtttctgagaatgcttctttcttgtttttctgtgaagatattcccgtttccatcaaaggcctcaaagcagtccaaatatccacttgtagattctactaaaagagtgtttcaaaactgctctatgaaaaattatgttcaactctgtgagttgaatgcaaacatcactaagatgtttctcagaatgcttctgtctagttttatgtgaagatatatccttttccacagtaggcctcaaagctttccaaatgttcacttggagattctacaaaagagtgttccaaaactgctctatcaaaagaagtttcatatctgtgagttgacagcacacatcacaaagaagtttctgagaatgcttctatctaatttttatgtgaagatattcccatttccaacaaaggcttcaaagcagtccaaatataaccttgcagatactataaaaagagtgtttcaaatctgctctatgaaaaggtatgttcaactctgtgagttgaatgaaaacatcacaaagaagtctgacaatgcttttgtctagtttttatgtgaagatatttcctttttccaccataggcctcaaagtgctccaaatgtccacttggatattgtacaaaaagagtgtttcaaaactgctctatcaaaagaaaggttcaactctgtgagttgaatgcgcacatcacaaagaagtttctgagaatgcttctgtctagttttaatgtgaaaatgtttccctttcaaacgaaagcctcaaagcagtccaaatatctacttgcagattcaacaaaaagagtgtttcaaaactgctctcttaaaaggtatgtttgactctgagagttgaatgcaaacatcaaaaagtagtttctgagaatgcttctctcttgtttttatgtgaagatatattcttttccactaaaggcctcaaagcactccaaaggttctcatgcagattctacaaaattagtgtttcaaaactgctctatcaagagaaaagttcaactctgtgagttgaatgcacacatcacagagtcgtttctgagaatgtttctgtctagtttttctgtgacgacattcccgtttccaaccaaggcctcaaagcagtccaaatatccacctgcagattctacgaaaagagtgtttcaaaactgctctatgaaaaggtgtgttcaactctgagagttgaatgcaaacatcacaaagacatttctgagaatgcttctgtctagtttttatgtgaagatatttccgtttccaacaaagtcctcaaagtggtccaaaaatccactttcagattctaagaaaagagtgtctcaaaactgctctatgaaaaggtatgttcaactctgtgagatgaatgcaaacatcacgaagaagtttctgagaatgcttctgtctggtttttatgtgaagatatttccttttccacaataggcctcaaagctctacaaatgtccacttgcacatcctacaaaaagagtgtttcaaagctgctctatcaaaagaaaggttcaactcggtgagttgaatgcacacatctcaaataagtttctgagaatgattctgtctagtttttatgtgaatatatttccgtttccaacgaaggcctcaaagcagtccaaatatccaattgcagattcaacgaaaagagtgtttcaaaactgctctacgagaagatgtgttcaactatgtgagttgaatgctaacatcacaaagaagtttctgagaatgcttctgtctagtttttatgtgaagatatatcctttttcaccaaaggcctcaaagcactccaaaggttctcttgcatattctacaaaaagagtgtttcaaaactgctctatcaagagaaaagttcaactctgtgagttgaatgcacacatcacaaagccgcttctcagaatgcttctgtctagttgttatgtgacgacattcctatttccacccaagacctcaaagcagtccaaatatccacctgcacattctacgtaaagagtgtttaataactgctctttgaaaatgtgtgttcaaatctgtgagttgaatgcaaaaatcacaaagaagattctgaaaatgcttctgtctgatttttatgtgaagatatttccttttccaccatacgcctcaaagctctccaaatgtccaattgcaggttctagaaaaagtttgtttcaaaacagctctatcaaaagaaatgttcaactctgtgagttgaatgcaaacctcacaaagaagtttttgagaatgcttgtgtctagttttactgcaagatatttcattttccagagtaggcctctaagctctcaaatgtccacttggagattctacaaaaagagtatttcaaaacagctctatcaaaagaaagattcaaatctgtgagttgagtgcgcccatcacaaaggagtttctgagaatgcttctgtctaatttttatgtgaaaatattttcttttccaccataggcttcatatctttccaaatgtccacttgcagattctacaaaaagagtgtttcataactgctctatcaaaagaaaggttcaaatctgtgagttaaatgcacacatcacaatgaagtttctgagaatgcttctgcctagtttttatgggaagacattcccgtttccaaggaaggcctcaaagcagtccaaatatccaattgcagattctacgagaagtgtgtttcataactgctctatgaacaggtaagttcaactctgtgagttgaatgcaaacatcacaaagaaatttctgagaatgcttctgtctggattttatgtgtagatatttacttttccaccataggcctcaaagctctccaaatgtccccttgcagattctacaaaaagagtgtttcaaaactgctctatcaaaagaaaggttcaactctgtgacttgaatgcacatatcacaaataagttactttgaatgcttccgtcttgtttttatgtgaagatattcccgtttccaatgaaggcctcaaagcattccaaatatccacttacagattctactagaagagtgtttcataactgctctatgaacaggtaagttcaactctgtgagttgaatgcaaacatcacaaagaagtttctgagaatgcttctctctagattttctgtgtagatatttacttttccaccataagcctcaaagcaatccaaatatacacttgaaggttatacgaaaagagtgttttgaaactgctctattaaaaggtatgttcaactctatgagttgaatgcacacatcacaaagaagtttctgagaatgcttctgtctactttttatgtcaagatattcccttttccaacgaaggcctcaaagcagtccaaatatccacttgcagattctacgaagagagtgtttcaaaactgctctatgaaaagaaaggttcaaatctgtgagttgagtgcacacatcacaaagaagtttctgagaatccttttgtctaatttttatgtgaagatattcccgtttccaaagaaggcctcaaagcagtttaaatatacactttcatattctacgaagagtgtttcaaaactgctctatgaataggtatgttcaactctgtgagttgaatgcacatatcacaaaggagtttctgaaaatgcttctgtctagtttttatgtgaagatattcccatttccaacgaaggcctcaaagtagtccaaatatccacttgcatatactacgaatacagtgtttcaaaactgctctatgaaaagaaaggttcaaatctgtgagttcaatgcacacatcataaataagtttctgagaatccttttgtctaatttttatgtgaagatattcccgtttccaacgaaggcctcaaagtagtccaaatatccacttgcatatactacgaaaagagtgtttcaaaactgctctatgaaaagatatgttcacctttgtgagtcgaatgcaaacatcaaaaagaagttattcagaatgcttctgtctagtttttatgtgtagatatttcgttttccaccataggcctcaaagctctccaaatgtcaaattgcagattctacaaaaagagtgtttcaaaactactctatcaaaaaaagttttagctctgtgagtttaatgcacacatcacaaaggaggttctgagaatgcttccgtccagtttttatttgaagatcttcccgtttccaacgaagtcctcaaagtggtgcaaatatccacttgcagattctaaggaaagagtgttttaaaactgctctatgaaaatgtatgttcaactctgtgagttgaatgcaatcatcacaaagaagtttctgagaatgcttctgtctagtttttatgtgaagatatttccttttccactataggcctcaaagctttccaaatgtccacttgcagattctacaaaaagaggatttcaaaactgctctatcaaaagaaagaaaggttcagctctgtgagttaaatgcacacatcacaaagatgtttctgagaatgcttctgtctagtttttatgtgaagatattcccatttccaacgaagacctcaaagcagtccaaacacccacttgcagattctacaaaaagagagtttcaaaactgctctatgaaaaggtatgtttaaatctataagttgaatgaacacatcacagagaagtttctgagaatgcttgtgtccagtttttatgagaagatattcctgtttcccatggaggcctcaaagcagtccaaatgtccacttgcagattctaagaaaagaatttttcaatactgctttataaaaagttatattcaactctgtgagtttaatgcaaacatcacaaagaagtttctgagaatgcttctgtcttgtttatatgtgaaggagaaataaaattcttttcagacaagcaaatgctgagagattttgtcaccaccaggcctgccctaaaagagctcctgaaggaagtactaaacatggaaaggaacagccggtaccagctgctgcaaaatcatgccaaaatgtaaagaccatcgagactaggaagaaactgcatcagctaacgagcaaaataccagctaacatcataatgacaggttcaaattcacacataacaatattaactttaaatgtaaatggactaaatgctccaattaaaagacagagactggcaaattggataaagagtcaagacccatcagtgtgctatattcaggaaacccatctcacgtgcagagataaacataggctcaaaataaaagggtgggggaagatctaccaagcaaatggaaaacaaaataaggcaggggttgcaatcctagtctctgatacaacagactttaaaccaaccaagatgaaaagagacaaaaaggccattacataatggtcaagtgatcaattcaacaagaagagctaactatcctaaatatatatggacccaaaacaggagcaccctgattcataaagcaagtcctgagtgacctacaaagagacttagactcccacacattactaatgggagactttaacacctcactgtcaacattagacagatgaatgagacagaaagtcaagaaggatacccaggaattgaactcagctctgcaccaaggggacctaatagacatctacagaactctccaccccaaatcaacagaatatacatttttttaagcaccacaccacacctattccaaaattgaccacatacttggaagtaaagctctcctcagcaaatgtaaaagaacagaaattataacaaactatctctcagaccacagtgcaatcaaactagaactcaggattaagaatctcactcaaaaccgctcaactacatggaaactgaacaacctgctcctgaatgactactgggtacataacgaaatgaaggcagaaataaagatgttctttgaaaccaacgagaacaaagacaaaacatacctgaatctctgggatgcattcaaagcagtgtgtagagggaaatttatagcactaaatgcccaccagacaaagcaggaaagatccaaaattgataccctaacatcacaactaaaagaactagaaaagcaagagaaaacacattcaaaagctagcagaaggcaagaaataactaaaatcagagcagaacggaaggaaatagagacacaaaaaacccttcaaaaaattaatgcatccaggagttggttttttgaaggatcaacaaaattgataaaccgctggcaagactaataaagaaaaaaagagagaagaatcaaatagatgcaataaaaaatgataaatgggttatcaccactgatcccacagaaatacaaactatcatgagagaatactacaaacacctctatgcaaataaactagaaaatctagaaggaatggataaattcctcgacacatacactctcccaagactaaaccaaaaagaatttgagtctctgaatagaccaataacaagatctgaaattgtggcaataatcaatagcttatcaacgaaaaagagtccaggaccagatggattcacagccgaattctaccagaggtacaaggaggaactggtaccattccttctgaaactattccaatcaatagaaaaagagggaatcctccctaactcattttatgaggccagcatcatcctgataccaaagccggggagagaaacaaccaaaaaagagaattttacaccaataaccttgatgaacattgatgcaaaaatcctcaataaaatactggcaaaccgaatccagcagcacatcaaaaagcttatccaccatgatcaagtgggcttcatccctgggatgcaaggctagttcaatatatgcaaatcaataaatgtaatccagcatataaacaaaaccaaagacaaaaaccacatgattatctcaatagatatagaaaaggctttgagaaaattcaacaactgttcatgctaaaaactctccataaattaggtattgatgggatgtatttcaaaatagtaagagctatctatgacaaacccacagccaatatcatactgaatgggcaaaaactggaagcattccctttgaaaactggcacaagacagggatgccctctctcaccactcctattcaacatagtgttggaacttctggccagggcaattaggcaggagaagtaattaaagggtattcaattaggaaaaggggaagtcaaattgtccctgtttgcagatgacatgattgtatatctagaaaaccccattgtctcagcccaaaatctccttaagctgataagcaacttcagcaaagtctcaggatacaaaatcaatgtacaaaaatcacaagcattcttatacaccaacaacagacagagagccaaatcatgagtgacctcccattcacaattgcttcaaagagaataaaatacctaggaatccaacttacaagggatgtgaaggacctcttcaaggagaactacaaaccactgctcaaggaaataaaagaggatacaaacaaatggaagaacattccatgctcatgggtaggaagaatcaatattgtgaaaatggccatactgcccaaggtaatttacagattcaatgccatccccatcaaggtatcaatcactttcttcacagaattggaaaaaactactttaaagtttatatggaaccaaaaaagagcccacatcgccaagtcaatcctaagccaaaagaacaaagctggaggcatcacactacctgacttcaaactatactacaaggcaacagtaaccaaaataacatgatactggtcccaaaacagagatatagataaatggaacggaacagagccctcagaaataatgccacatatctacaactatctgatctttgacaaacctgagaaaaacaagcaatggggaaaggattccctatttaataaatggtgctgggaaaactggctagccatatgtagaaagctgaaactagatcccttccttacaccttatacaaaaatcaattcaagatggattaaagacttaaatgttacacctaaaaccacaaaaaccctagaagaaaacccaggcattaccattcaggacataggcatgggcaaggacttcatgtctaaaacaccaaaagcaatggcaacaaaagacaaaattgacaaatgggatctaattcaactagagtttctgcacagcaaaagaaactaccatcagagtgaacaggcaacctacaaaatgggagaaaatttttgcagcctactcatctgacaaagggctaatatccagaatctacaatgaactcaaacaaatttacaagaaaaaaacaaacaaccccatcaaaaagtgggcaaaggacatgaacagacacttctcaaaagaagacatttatgcagccaaaaaacacatgaaaaaatgctcaccatcactggccatcagagaaatgcaaatcaaaaccacaatgagataccatctcacaccagttagaatggcaatcattaaaaagtcaggaaacaacaggtgctggagaagatgtggagaaataggaacacttttacactgttgttgggactgtaaactagttcaaccattgtggaagtcagtgtggtgattcctcagggatctaaaactagaaacaccatttgacccagccatcccattactgggtatatacccaaaggactataaatcgtgctgctataaagacacatgcacatgtatgtttattgcagcattattcacaatagcaaagacttggaaccaacccaaatgtccaacaatgatagactggattaagaaaatgtggcacatatacaccatggaatactatgcagccataaaaaatgatgagtgcatgtcctttgtagggacacggatgaaattggaaatcatcattctcagtaaactattgcaagaacaaaaaactaaacaccacatattctcactcataggtggaattgaacaatgagaacacatggacaacaggaaggggaacatcacactctggggctgttgtggggtggggggagggggagggatagcattgggagatatacctaatgctagatgacgagttagtgggtgcagcgcaccagcatggcacatgtatacatatgtaagtaacctgcacattgtgcacttgtaccctaaaacttaaagtataataataataataaaaaaagaatggtttaactctgggagaagaatgcacacatgaaaaagaagtttctcagaatgcctctgtctagtttttatgttaagatatttgtttttcaccttaggcctcaaactgcccagaaatatccctttgcagattgtacaaaaagatggtttccaaactgctcaatgaaaacaagggttcaacactgtgacatgaatatgcacatcacaaagaagtttttcagaaagcttctgtttagtttttaagtgaagatatttcctttttcaccataggcctcaaagtgctccaaatatccttttgcagaacctaaaaaaaaaagagtttccaaactgttcaattaaaagaaatctgtgagaagaaagcacacatcacaaagaagtttctcataatgcttctgtctactttttttgtgaagatatttcctatatcaccataggcctcaaaggtctcaaaaatatccctttgcagactgtacaaaaacacagttttcaaactgctccatgaaaagaaagtttcagatctgtgagatgaatgcacacataataaattactttctcataatgctttgatctagtttttatgtgaagatatttctttttcaccatagacatcaaaccattcagaagtatccctttgtagattgtacaaaaagacggtttccaaactgctcaatcaaaagaaaggttcaaacatgtgagttgagtgcacagataacaaagaagtttctcagaaatcttctgtcttgtttttatgtgaagatatttcatttctcaacataggcctcaaagcaatccaaatagccatttgcagattctacaaaaagactgtttcccaactgatcaatcaaaacaaatttttagctctctgagatgaaagcacacatcacaaaaaagttactcagatagcttctctctagtttgtatgtgaagatatttcctatttcacctgatgccataaagggctcacacatacccctttgaaggttctacaaaaagactgtttccaaactgcttaatcaaaagaaaggttcaactctgtgagatgaatggacacgtcacaaggaaattctcagactgactctgtctagtttttacgtgaagatatttctctttcaccataggccacaaatggatcagaattatccctttgcagattgtacaataagcctctttccaaccttttcaatcaaaagaaaggttcaactctgtgagatgaatccacacatcacaaggaagtttctcagaaagcttctgtttagtttttatgtgaagatatttcgttttccaccatgggtctcaaagcactccaaatatccatttgcagattctagaaaaagagtgtttccaaagttctcaatcaaaagaaagtttcaattctgtgagatgaaagcacacatcacaaacaagtttcttagaaagcttctgtctagtttttatgtgaagatatttcacatttcaccatagtactcaatgggctctgaaatatccctttgcagattctacagaaggactgtttccaaactgctcaatccaaagaaagtttcaactctgtgagatgaatgcatacatcacaaagaagtttctcagaatgcttctgtctagtttatatgtgaagaaaattcctacttcaccataagcaataaagggctcacaaatattttttgcaaattctacaaaaagactttttccaaactgctcaatccaaagaaaggttcaactctgtgagatgaatggacacatcacaaagaagtttctcagaatgcatctgtccagtttttatgtgaagatatttctttttcactctaggcctcgatgggctcagaaatatccctttgcagattctaaaaatggactgtttccaaactgctcaatctaaagaaacgttcacctgtgtgagttgaatgcacacatcacagagaagtttctcagcatgcttctgtctagtttttatgtgaaggtatttcctttttcaccataggcctcaaaccactcacaaatatccctttgcagattctacaaaatgaattgttgtcaaactgctcaatgaaaagcaaggtccaaatctgtgagatgaaagcatgcatcacaaagaagtttctcagaaagtttatgtctagtttttatatgcagatatttcctttttcaccataggcctcaaagcactccaaatattcgtttgcaagttctacaaaaagactgtttccaaactgctcaatcaaaagagaggttcaactctgtgaggtgaacgcacacagcacaaagtagtttttcagaaaccttctgtctagtttttatgtaaagacatttcctatttcaccataggccccaatgggttcacaaatatccctttgcagattctacagaaggactgtttccaaacttctcaatccaaggaaagtttcaactctgtgatgtgaatgcagacatcacaaagaagtttctcagaatgcttctgtctagtttttatgtgaagatatttcctgttcaccataagcctaaaatactgcaaatatccatcttcagattctacaaaaagactgtttccaaactgctcaatcaaaagaaaagttcaactctgtgagaggaaaacatacatcacaaagaagtttctcagaaagcttctgtttagtttttttttgtgaagatattccctatttcaccataggcctgaaagggctcacaaatatccttttgcatattctacaaaaagactgcttccaaactgctcaatcaaaagagaggttcaactctgtgtgatgaatgcacacattacaaagaagtttctcagaaagcgtctgtttagctttcatgtgaagatatttcctctttcaccataggcctcaatgggcccagaaatatccctttgcagattctatgaaaggactgtttagaaaactgctcaatctaaagaaagtttcagctctgtgagatgaatgcacacatcataaacaagtttctcacaatggatctgtcggctttttatgtgaagatatattctttttaaccataggccttaatccactcatgaatattcctctgcagatactacaaaaagactgtttccaaactgctgcatccaaagaaatgttcatctctgtgagatgaatacacacatcacaaagaagtttctcagaatgtttctgtctggttttcatttgaagatatttcctttttcaccataggcctcaaagtgttccaaatatccatttacagactctacaaaaagagtgtttccaaagtgctcattcaaaagataggttcacctctgtgagatgaaagcacacatcacaaagtagtttctcagaaagcttctgtctagtttttatgtgaagatatttcctttttcaccataggccataaagggctcacaaatattttttgcaaatactacaaaaagactttttccaaactgctcaatccaaagaaaggttcaactctgtgagatgaatggacacatcacaaagaagtttctcagaatgcttctgtccagtttttatgtgaagatatttctttttcaccctaggcctcaatgggctcagaaatatccctttgcagattctaaaaaaggactgtttccaaattgctcaatctaaagaaaggttcacctctgtgagttgaatgcacacatcacagagaagtttcccagaatgcttctgtctagtttttatgtgaaggtatttcctttttcaccataggcctcaaactgctcacaaatatccctctgcagatacaacaaaaggactgtttccaacctgctaaatcaaaagctagcctcaacaacatgagatgaatgcacacgtcacaaagaagtttctcagaatgctttcatctagtttttatgtgaagatatttcctttttcaccataggcctcaaaacactccaaacatccatttgcagattccacaaaaagactgtttccaaactgctcaatcaaaagaaaggttcaactctgtgagatgaaagcacacatcaaaaagaaggttctcagaaagcttctgtctagtttttatttaaggatatttcctatttcaccacaggcctcaaaggaatcaaaaatatccctttgcagattctacaaaaagactttctgaactgctcaatgaaaagaaagtttcaaatctgtgaggtgaatgcacacataaaaaagaagtttctcagaatgcttctgtgtagtttttatgtgaagatatttcctttttcaccataggccataaagggctcacaaatattttttgcaaatactacaaaaaaactttttccaaactgctcattccaaagaaaggttcaactctgtgagatgaatggacacatcacaaagaagtttctcagaatgcatctgtccagtttttaatgtgaagatattttttttcaccctaggcctcaatgggctcagaaatatccctttgcacattgtgtaaaaagactgtttccagactgctcaatgaaaagaaagattaatctctgtgagatgaatgcacacataaaaaataagtttctcagaatgcttctgtatagtttttatgtgaagatattttatttttcaccataggcctttaactgttcacaaatatccctctgcagatactacaaaaagactttctccaaactgctccaagaaaagtaaagttcaactctgtgagatgtaggcacacatcacaaggaaatttctcagaatgattctgtctagtttttatgtgaagataattctttttccccataggcatcaaatggctcagaaatatcccttttcaggttgtacaaaaagatggtttccaatctgctcaatcaaaagaaaggatcagctctgtgatatgaatccacacatcacaaagaagtttctcagaaagcttctttttagtgtttttgtgaagataattcctttttcaccataggcctaaaagcgctgcaaatatccatttgcggattctacaaaaagactgtttccaaactgttcaatcaaaagaaaagttcatctctgtgagatgaaagcacaaatcacaaagcattttctcagaaagattctgtcttatttttatgtgaagttatttcctatttcaccatagtctgtaaagggctcacaaatatccgtttgcatatttaaaaaaaagactgtttccaaactgctcaaacaaaagaaaggttcaaccctgtgaggtgaatgcacatatcagaaacaagtttctcagaatgcttctgtctagtttttatgtgaagaaatttctttttcaccatcggcctcaaatggctcagaaatatccttttgcagattttacaaaaagacgtttccaaactgctcaatcaacagaaagattcaactctgtgagatgaatgcacacatcacaaagaagcttctcagaaagcttctgttttgtttgtatttgaagatatttcctttttcaccataggcctcaatgggctcagaaatatccctttgcagattctacaaaaggattgtttagaaaactgctgaatccaaagaaagtttcaactctgtgagatgaatgcacacatcacaaagaagttccacagaattcatctgtctagtttttatgtgaaggtatttcttttttgaccataggcctcaaagcactccaaatacccatttgcagattctacaaaaagagtttttccaaactgctcaatcaaaagaaaggttcaactctgtgacacggaagcccacgtcacaaagaagtttctcagaatgcttctgtctagtttttttgtgaagatgtttcctatttcaccttgggccatatagggctcaaaaatattttttgcagattctaccaaaagactgtttccaaactgctcaatccaaagaaagttttaactctgtgagatgaatggactcatcacaaaaaagtttatcagaatgcttctgtctagtttttatgtgaagacatttctttttcaccctaggcttcaatgggctcagaaatatccctttgcagattctacaaaaggacagtttccaaactgctcaatcaaacaaaggttcaacactatgagatgaatgcacacatcacagagatgtttctcacaatgcttctattttttatgtgaaggtatttcctttttcacaatgggcttcaaagcactccaaacatccatttactgattccacaaaaagactgtttccaagctgctcaatcaaagaaaggttcaactctatgagatgaaagcacacatcacagagatgtttcttacaatgcttctgtctattttttatgtgaaggtatttcctttttcaccatgggcctcaaagtgctccaagcatccatttgctgattccacaaaaagactgtttccaaactgctcaatcaaaagaaaggtacaactctgtgagttgaaaacacgcatcacaaagaagtttctcagaaagcttctgtctagtttttttgtgaggatatttcctgtttcaccgtgggccataaagcgctccaaaatattttttgcagattccacaaaaagactgtttccaaattgctcaatgaaaagaaaatttcaactctgtgaattgaaagcacacatcacaaggaaatttctcagaatgtacctttctagttttttgtgaagatatttcctttttcaccacaggcctcaaagcactgaaagtatccatttgcagattctaccaaaagactgtttacaaactgctaaatcaaaagaaagtttcagctctgtgatatgaatgcacgcatcacaaagaagtttctcagaaagcttctgtttagtgtttatctgaagaaatttcctttttcaccataggcctcaaagcactccgaatatgcatttccagattctataaaaagtctgtttccaaactgctcaatgaaaagaaaggtttgactctgtgagatgaaagcacatatcacaaagaagtttctcaggatgtttctttctagtttttttgtgaagatatttcctctttcactatagtcctcaaagtgctccaaatatccatttgcagattatacaaaaagactgtttacaaacggctcaatcaaaagaaagtttcaactctgtgagatgaatgcatgcataacaaagtagtttctcagaaagcttctgttcagttgttttgtgaagatatttccttttcaccataggcctcaaaacactccaattatccatttgcagattctgcaaaaagagtgtttccgaactgctcagtcaaaagaaacgttcaactctttgagatgaaagcactcattgaaaagaagtttctcagaaagcttctgcctagctttcatgtgaaggtatttcctatatcaccaaaggcctcaatgggctcagaaatatccctttggggatactacaataggactgtttccaaactgctctagcaaaagtaagcttcaactctgtgagatgaatggacccatcacaaaaaagtttctcagaatgtttctgtgtagtttttatgtgaagatatttcctacttcaccataggcctcaaagggtccacaattatccctttgtagattttacaaaaagactgtttccaaatcttcaatcaaagaaatgttcaactgtgtgagatggatgcaaacgtcacaaagaagtttctcagaatccttccgtctaatttttacgtgatgatatttccttttttaccataggcctcaaagtgctccaaatatccatttgcagattctacaaaaagagtgttttcaaattgcccaatcaaaagaaaggttcaactctgtgagatggaagcacacatcataaagaagtttcttagaaacattctgtctagtttttatgggaagatatttcatatctcaccataggcctcaatgggctcagaaatatccctttgcagattctctgaaaggactgtttccaaacttttcaatcaaaagaacggttaaactctgtgagatgaatgcacatatcacaaagaactttctctgaaatcttctgtctagtttttatgtgaagatatttcctttttcaccataggcctaaagccactcacaaatatccctttgcagattttacaagaacagagtttccagacttatcaaagaatagaaacttttatctctctgagatgagtgcacatcttacaaaacagcttctcagaaaaattctttatagtttttattgaagatatttcctttttcaccataggcctcatagagctgaaaaatatccctttgcagattctacaaaaagtctgtttacaaactgctcaatcgaaagaatggttcaactctgtgagataaatgtacacatcacaaagaggcttctcagaaatcttctgtctagtttttatgtgaagatatttcctttctcccataggcctcaaagtgctcataaatatccctttgcagattctacaaatagacagttttcaaactgctcagcaaaaagactgtttcaactctgtgagatgaatgcatacatgacagggaggtttctcagagaacttctgtctattatgtgaaggtatttcctttttcaccaaaggcctcaaagcgctcacaaatatctccttgcagattctacaagaacagagtatccaaactgattaatcaaaagaatgcttcacataaaatccctagaagaaaacctaggcaataccattcaggacataggcatgggcaaggacttcatgtctaaaacacctaaagcaatggcgacaaagccacaattgacaaatgggatctaaataaactaaggagcttctgcacagcaaaagaaaccaccatcagagggaacaggcatcctacagaatgggagaaaatttttgcaacctactcatctgacaaagggttaatatccagaatctacaatgaactcagacaaatttacaggaaaaaaaaacaacctcatcaaaaagtggttgaaggataggaacagacactgctcaaaagaagatatttatgcagccaatgaacaaatgaaaaaatgctcatcatcactggctatcagagaaatgcaaatcaaaaccacattgagatatcatctcacaccagttagtatggcgatcattaaaaagtcaggaaacaacaggtgctggagaggatgtgagaaataggaacacttttgcactgttggtgggactgtaaactagttcaaccattgtggaagtcagtgtggtgattcctcagggatctagaactagaaatatcacttgacccagccatcccattactgggtatatacccaaaggattataagtcatgctgctttaaagacacatgcacacatatgtttatagcggcactattcacaatagcaaagacttggaaccgacctaaatgtccaacaacgatagactgtatgaagaaaatgtggcacatatacaccatggaatactatgcagccataaaaaatgatgagttcctgtcctttttagggacatggatgaagctgggaaccatcattctcaatgaactattgaaaggacaaaaaatcaaacaccacatgttctcactcatagttgggaattgatcaatgagaacacatggacacaggaagcaaaatatcacacaccacacatcagggactgtagttgggtgggcggagggggagggatagcattaggagatatacctaatgctaaatgatgagttcatgggtgcagcacacaaacatgacacatgtatacatatgtaacaaacctgcacactgtgcatatgtaccctaaaacttaaagtataataataataaaagtaaataaataaaaaaacccagagctccaaaaagaaaaagaagaagatgaatgtttcaactctatgagatgaatgcacacatcataaataagtctctcagaaagcttctgtctgcattttatatgaagatatttcctttttcaccataggcctcaaagcactcacagatatccctttgcagattctacaaggaaagagtttcccatctgctcaatgaaaacaaacgtttacctctgtgagatgaatgcacacattacaaagtagtttctcagaaaccttctgtctagtttttatgtgaagttatttccttttttcccataggcctcaaagcgctcacaaatatccctttgctgattctacaaaaacactgtttccagactgctcaatcaaaagaatggttcaacagtgtgagatgagtgcacacatcacacagaagtgtctcagaaagcttctgtcccatgtgaagatatttcctttttcaccatagacctcaaagcattcacaaatatccctttgcagattctacaaaaagactgtttccaatatgctcaatcaatagaaaggtttaactctgtgagatgaattcacacaacacaaagcagtttctcagaaaccttctttctagtttttatgtgaagatatttcctttttcaccataggcttcaaagcgctcagaaatatccttttgcagattttacaagaagattgttaccaaactgctcaatcaaaagaatggttcaactatgtgagatgaatgcacacatcacaaaaagtttctcagaaagcttctgtctgttttttatgtgaagatatttcctttttcaccattggcctccaagcactcacaaatatccctttgtcgattctacaaaaatactgtttccaaactgctcaatcaaaagaatagttcaactctgtgagatgaatgcatacataaccaggaagtttttcagaaacttctgtcaagtttttatgcgatgatatttcctttttcaccataggcctcaaactgctcacaaatatccctttgcagattctacaagaaaagagtttcccatctgctcaatgaaaagaaacgtttacctctgtgagatgaatgcacacattacaacgcattttctcagaaaccttctgtctagtttttatgtaaagatatttcctttctcaccataggcgtcaaagtgctcacaaatatccctttgcatattctacaaaaagactgttaccaaactgctcaatcaaaagaatggttcaactctgtgagatgaatgcacacatcacaaagcagtttctcataaaccttctttctagtttttatgtgaagatatttcctatttcaccataggcctcaaagcactcacaaatatccctctgcagattctacaaaaacactatttccaagcatttcaatcaaaagaatggtttaactctgtgagatgaatgcacacatcacaaagtagtttctcagaaagcgtctgtctagtttttatgtgaagatatttcctttttcaccataggcctcaaagcactcacaaataccactttgcagattgtacaagaacagagtttccagactgattaaaggaatgaaacgttttaatcggggagatgaatgcacacatcacaaagcagtttctcagaaaccttctttatagtttttatgtgaaggtatttcctttttcaccatggcctcaaagcactcacaaatatccctttgcagattctacaacaacggaatttccaaactgctcataattagtttttaggaccaacatgagcatttagaaacactgcttgtggtgcagcacacatgtattatccacactgaaattaggaattcaactgaagttcatgtagagccaaaaatgtgaatatttgggggacctcggagatgatctagctcactttattttgtagaaaagaaaacagtttcagggaaagggcatgcattgcctaaggtgattcagcagctttggcacagaaacacaacacactttaggtgattcatcaggtttggagcagaaacgcaatacaatctctgttctttttcctctcagatccagaattttttcacaatactgaactacttatgtttctgattccttatttttcctttctaaattttgccagtattgcctaatgaaggtcctattctataccctaaatatttaaattcgttgccactattgtctctttataagtaaaattactagttgctattataaatgattattcaatcacttttcatttttggggggttcagtacaaagttagtaacaaataaacactattggccttggcaatacaagaggagctcaagtcctccagggcacgtcaggaaaaggctaaatgacagctgtgctgcgagtggacagaatacagctctcatacagactactgagtatttgatgttcttcaacaatttcattaatcttcagttttttcctctttgaagtgaaagtctgctatgactttgaagtttctttcgaaataattatagattcacaggaagttgcaaaaggtacaatgatgtcttaggtactcttcactaattccagtggtgacttctcacatagcaatagagcattatcaatacctggaaactgacataggtacaattcagaaagcttactcggatcgcaaccattttgtatgcattcatttttgtatgtgtgtatgcgtgtgcgtgtgttctgtgcatttttatgtggtgtagatctctgtaactaccacttccacagtcaagatacagaactgtagcctcatcaccaggctccaacttgcgatctttgctgaaactctgacacgttttcctccatcccttccccttggcaaccccatagcatgttctccatctttacaattttatttcaataatttatataaatgtaattgtacaaaatcatatttttaaatggaaaaaacaagtcacagatagttttgttagcactgtaaaatagtctttaacattcatttgttttatgttctatttgtctcaaaaaaatgtgctttgttctttcccatactttctgatatcaggataggaaatcaataccaaacaaaacatttccattcatttttttccacagcttggttttcactgttgttgcctaacatttattgttgtatttactctttctctctgttttccatcacataaaagtaactttgtgttctttatctcttctaagaaaacttggtaatgagtctttaatgtgacgcctggaccacccttgttttgattttgtgttatgggtgttcttttgtgtgatcgttctcatggagcgtccttgtgaagctgggcttttccagtggtttttcaaaatggaaatatatatttaacaaaccaaacacaaaatgaccttgctccaggaatgcatcatttctgagaaaacactacctcttccaactagagattgtgaatattactcatattatcctttactcccttttattaaagctgtatttttttttacacatttgtataaatggggtaatgaaatgtgaaactaagtgattgcctaccaattacaattggtgttaacgatgctactgggaggccacccctacagtggctgcgcggagtttagggacttcctagctttgctaagttacatgggatttcctacgtactaaatggaggtgggggactggtccgaggacgcagcggtgccgccctggcctgacgtggaagctacagaccgggccccaggcactgcgcggccgagagacggaggcgggcgcacgatggcggacaacaccgcagcatccagcgagtcaccgccaggggcacgcgaaccccaggacctcggccacaagccctgccagacgggccgcgtggcgggcttccgtccccggacacaaccgcgatgcgcgcccggcaggcggggggcgggcgggagaggaggactgtggcttggaggggtgttggggaggaggggcgctggagcagcggtgtgccggttgccgggcagccaccaggggcggaggcgaaccacggcgatcgggacgcgctcccccaccatctccccggcagacccttcctacttgcctgcctgcacccccaacaaacccacactacccacgacgcgcgacgacgacggcacgagaccttccaccccgccagggccaacgaaccctgcaccacgagctgcgtgaggcgcgagggagccccggagggaggaaccaggaccgcggtggtggccacgggaactcggccccagccggctctcttccctctgttttcgcgggtggcagcgccaccctctctcgcttcctcacagctaggagccccccttccccatgccacccaatgcgtgaccacacaggacctgcggggggagggagaaggggcgggcatggcggcagaggagggcggacgtggccagtctgcacttgaggggacggagggccccagcaggccatgccagggaatccccagccttgcaccccgaggagcccggaggcacccccggggactattgatcggcaagcgacgctcagacagacatagccctgggaggaacccgggccacaagtgcattcgaagtatggatgatcaatgtgtcctgcaattcacattagttatcacagctacctgcgttcttcatcaacgcagaagcccaataatccatggctaaaagtcatacaaggtggatttggcgagggcgctcccaacaccgggaggccctactggcacaacaggtcccccagagggtttacctcaggccggccattcagacagcaaggggaccagactccagagaggggtcggaaggtttcacaacacagggaggaagtgccgaccacggggtggcgaacgctgacagcaccccatgggcgcccagggattcccgaccccacagcccagggcaaaggccacacacacggcacgcgcgcgatggcacgacggccgccggtaaagcccccaccggcgtcagctgcgacacgcaagtgcggcgcggccccggccggcggagaggatggagtcggcgggggaggtgagagaggggcgggcccctcccgaacggactccccccccggcccaccgcacccgacccacgggcagacgggcgaccccccaaggggtccttaaacctccgcgccagaacgcgctaggtacctggagggcgggggcggatgaggagggggacaggcatccggccccctaccctcgagacgccctagcgggaaggctggggagagcgagcgggccaggccgggcccggtggcgcggtgtggcagaggcgaggatggtggcagcagcagcgatgggaactcggccggccccaacgggagccggcgggatggggccgagacggcgggacagggcgggacgaaggctccagcggggagggcaccgagacccccaccccaccgggacgccgagaaccatccccgagcccgccgacacacacgtgggggccatggcagggggccgctccccactgctcaccaggccagcaagccatccagcccgctccacgacaggcacacacggtttcgtccccgcacgcgtgtctctctctcccccctctctccttcccgagttctccggctctcagggcagacgaggccctgtaacaaacaaagggcacaaccctgcccacgcacgcgctgcaccgggaacacagtctgccaaggaggaaggacgcggggcggccccgacgtttgggcagcgaacgagaggcggaccgcagtgcccggggtctcaccgccagcggccttccagcaccaaggcggccccgcgcggcacctggagcggccgactggcctttggcgggcccgcggctccaacaccgccgccgccatcgcggccagcgcccggaaccctcttccctgcgtgcgctgcaggccgaccccaaaccctcccggcgcccaccaggcccatacggggcgccgccaacctggtcctgaaggcgcgctcccggggacatggacaacggaccaaccagtggctggcggtggtgccacacaaggcggagccaggtttggtcccagacagggccaccacagcctaagccggtgagccgcttggggagagaggatccgagggcgcggaggggggcacagacaggcaaggccagggaccgcgagggcaagggcacccaggagccggcagaggggcggctcggggagaaacctgaggcacggccaggccaccaggaaaacacggccacgggatcccaccgccacagacactagggaggtcccctggcgccccgcctaggactccggacggccctcggcacccaccgagacccgcctcacgagcccgggtcccgccatcgggacccagaagcgacctcagccacaaacccaactccagggccacgttgctcgtttctcttctatcctccaacccggtcaagctccgggagaccggcgcgccccccacatgggacacttcccatggccaggaggcccaacgccttgctacgcaaacgcggtggtcggcaccggtcgctgctcctcaggggagcgggcggagagccggctcgcagaggagcgggtcacgcgccggacggaacgccgggcacaaccaccgctcgcgcagcctcccaaccgctaggacgccggctcggcccggcgggatcctcccccgactcggaagggggaggcgcgggccacactgtaggtgacgaacggccctccgtccccaccgctgaggccaggggaaccctcgctctccccacctcaccccgtccagggggaagcggaggagggtcctctgcaagcgagtcactatggcagcgctaccataacgcagagagaggcggcaggcggggggatccggtacccccaaaggcacacctttcggatcgctagagaaggctttcgcaccgagggtgattcacactccccacccgccaatcgccccttgtcaggcctgcagacgcgctcagggacacctggggaagggagggggcccgcggtaccaggaaaaatctgcttgcggcaactttgagcctttgcggtctgggcggagggcctggccgctgtgcgtgggttcaatcccccaagtgcccctccgtccacccgcctgctttctcccaggcaaagcacctccaagtaaacccacacaaaacctgtcggaggcagaacggtagcccctcggcggcaggccggcgcacgcgtcactgcccgagcccaccgcggtcgctcacacggctcgcgcgcacccgccagaggggagcacgggacctgcgcttgccagaccaggcggcgcccttccccgcgtgagaggggcgcgtctcgctcaaccgcctcgacccccacaccaacgagctccctcaggacccactcgcagacatcgaagtggtgaacggaggagggggagctgggggtgggaaccacacaccaccgctcggcctctggcacctgagtgacaagctggcgggggaaaggggggagccgggcgtggtaggctcacgcctgtcatccctgcactttgggaggtgagggaaggtggatccctcgatccaagccttggcaacatggtgaaacctcatctctaaaaaaaaatacagaaactaactggtttcataacctggactcaaagttaataaatagataaatagaccaggcgcggtggctcacgcctctcatcccagcactttgggaggccgaggcgggcagatcacgggggtcaggagatcgagaccatcctggctaccacaatgaaaccccgtctctactcaaaatacagaaaattagccaggcgcgttggtgggtgcctatagtcccagctacttgggaggctgcgacaagagaatggcgtgaacccgggaggcagagcttgcagtgagccgacatcacgccactgcactccagtctgggcaacagagcgagactccgtctcaaaaaataataatgataataataaatatattaaaatagaaaattataaaaaaacgtagctggccgggcgcaattgctcacgcctgtcatcccagcactttgggaggccaaggtgggcagatcacctgaggtggccagttcgagatccacctgacccacatagagaaatgccgtctctactaacaatacaaaatcagccaggtgtggtgacacatgcctgtaatcccagctactcaggaggctgaggcaggagaatcgcttgaatacgggaggtggaggttgcggtgagccaagatggtgccattgcactccagtgtgggcaacaagagtgaaactccgtccaaaaaaaaaaaaaaaaaaattaagccctgtattctgttatttttacttcctaccctgagaagaacataatacaactgttgtctgtctgcctgcctgcctgcctgcctgcctgtctgcctgtgacagggcctcactctgtctttcgcccagactggagtgcagtgacaccattatggctcactcactgcagcctcaacctccccagggttaggcaattcctcaagggatcctacggcctcggcctcccaaagtgttggggttacaggcgtgagccaccatcacccggcctgagttaatacatctggtctcactacgtcttaaccacacacccatgaagaactcaagtcaagagagagtcggtaaaagactctcagcattctctcctgaaagcagtgaggtggatggcggccgtgtgtcccgagctcctgtggtttcaggtgaccacgcgtagaggagagatttccaatgtttccagagaggcgcgagccgcagtcattcggggcatccgagcacgagatggggtttctgacagcgacttaagggccaggaagggccagaatctgccaaggcccatgtcccagggtggggtcgatggaacccaaggtagagggagtcggcggtccgcaaggagagagctccagcccttggccccactgtgcagaccgaatcagaaggaagagagtccttcatcctacatgccacatccctccactgaacttgggagcaaatccgttttccaaacatgaggtgactctcactttgcaatggatcacaagaggccgggctttccagagtctgcagggtaaagaagtcattctggctcggcctcccccatcccctggtaactggtgagtttaaatgaggccaggctggctgggccagagctcctacggcggggaggggggttggcagggtgggggggttgcctgaggcactgcagaaagtgggtctgagcctcgaggatgatggtgctgcaggaacccgtccaggctgctatatggcaagcactaaaccactatgcttaccgagatgaggttttcctcgcagaacaccttcatgcagaagtacactcagaagaagccatgtttttactggcgacctgttcttaccgcccaggaaaggcctataaagcatatagactcttgaaaggacacagttgtcctacaccgcaatgaaaatacctgcttgcaaaatgttgtgttgatctcagcaagcttgcagaaggggaacaatcttatctggtggagtgtttaataagcagaaaagtcatgatgatattgttactgagtttggtgattcagcttgctttccccttccattgttgggacatgtatattgcaagacagattggcttgccaaaggatcagaatgtgaccgaaagaggcttagtttaaagcctttcctctggtatccctttgaatcattatgtgaaataggtgaaaagccagatcctgaccaaacgtttaaattcacatctttacagaactttagcaactgtctgcccaactcttgcacaacacaagtacctaatcatagtttatgtcacagacagcctgagaccattcttacggaaacaccccaggacacaactgaattaaacagattgaatttagaatcttccaattcaaagtactccttgaatacagattccccagtgtcttctattgattcagcgtaatttcacctgatactgtcccactgggaacaggaacttccatattatctaaacaggttcaaaataaaccaaaaactggtcgaagtttattaggaggaccaggagatcttagtccattaaccccaagttttgggattttgccattagaaaccccaagtcctggagatggatcctatttacaaaactacactaatataccttctgaaattgaggtgccatccaccggagccccttcaaaaaagtctgttgccagaattggccaaactggagcaaagtctgtcttctcacagagtggaaatagacgagaggtaactccaattcttgcacaaacagaaagttctggtccataaataagtacaacacctcaggtattgagccccactatgacatctcccccaaatgcactgcctcgaagaaattcaagactctttactagtgacagtttcccaaccaaggagaataggaagaaattaaaaatgaagtttccacctaaaatctcaaacagaaaaacaaaaagtaaaactaataaaggaggaataactcaacctaacataaatgatggcctggaaattacaaaattggactcttccattatttcagaagggaaaatatccacaatcacacctcagattcaggcttttaatcataaaaaacagcagcagaaggcttgatgagcctttttcatgaaagggtgaaaggttatttagctttgtgttcataccactgcaaagaagctataaatattttgagccatctaccttctcaccactacaatactggttgggtactgtgccaaattggaagggtctattttgaactttcagagtacatacaagctgaaagaatattctcagaggttagaaggactgagaattatagagtcgaaggcatggaaatctagtctacaacattttggcatcttcaaaaagatgttgttctttcagttatgtcaaaagacttaacagatgtggataaaaattcaccagaggcctgatgtgcttcagggaactgtttcagtttgcaacgggaacacgatattgcaattaaattcttccagagagctatccaagtggatccaaattatgcttatgtctatactctattagggcgagagtttgtcttaactgaagaattggacaaagtattagcttgtttttgaaatgctatcagagtcaatcctagacattgtaatgcacggtaagtggtaatgaagtgtaaagacaaagtcttgttgatggtgcttgtagtcactaatttttcttgttagatagctctttattgtcatgaatttggttactaatacttaggcatggtacatactagtaaataacttcaaactaacatgtttttttatgaaatgtatgtctttaacaaactcttcagttaactaatgataatagaataccagatccttatactcaacagtttcagtcttctaccacacttttgcagacactgtagttgtgttttgtttgtttgtttgcttgtttagttttgttacttgatttattactttttcttcgaacacagaaatggtgattgggacaaaaagtgcttgggaaattggaaaggaatagcataattcacttattggataataggaaaaaaacactgaaaaaattcactagttgctgctttttgacagtgttccagtttattgagttactattaagaacttagtatacccttttatttagcagtatctctgttttcctttttttacttgtgtataagtagacacataggaaattactatccaggtcatattgttatcaactgaataacatacgaaaaagtttggtcctacatctgcctcaacaccatacttactgttgacatttattgtatttttctggactgacttaaaagtttaaatatgaagagaaggccaggcatggtggttcatgcctctcatcccagcactttgggaggccgaggcgggcagatcacaaggtcaagagattgagaccatcctgtccagcatggtgaaacctcgtctctattaaaagtataaaaattagctggccatggtggcgggcacctgtagtcccagctactcaggaggctgaggcaggagaatcgcttgaacctgggaagtggaggttgcagtgagccaagattatgccattgcactccagcctgggtgacagagtgaaacgctgtctcaagaaaaaaattaaataaataaataaataaataaataaatatcaagagaaagtataattctgaagtcataactctgtggaagcttttttgtcagatacggttatctttggggttaattattataggagttgagttttaacatttgatttgcttctaaatctgaagcattatattgctaaaacattttttgatttgtgaatatgttgtttaatggattatatctcattttgcagtagtagttgcagtgtctgaaagattgccaaaaaaatagtgctagcttttgctgacaaatgtaacaatcaccttaccaatactgccttctcttctgatagctatgttttccataatactttaagaactcagttcttcataagacttgtgttgtttttgcttttttcccaagtctgattgatccttgtgttgttcttttttaaaagtgtattgtctgttcagctattccgcaggagtcacattcttaagaaccttaaccatatcaaaaattgtgtttaaaggaggattattcagattggccagcttttactaggaggagtttaaatgctgacatatttaggtaactctaaatactgagcaactttattctaactacaaaatagatagcctttcttttattttcactttcactatcattagcaccgtgtttaataccttttcttcatctataacacaattataacgatatataaagccactcaaataaagcagatatatcgtgctttaaaaaaaaaaagaaatttaaaaaagaagtcattatgtggcacacaacgaggtgtgactcgaatctagaatctccagtgaaaaccaatgaaacagggtcaaaccccgtgtgtactaaaaattaaaaaatgatccgagcgtggtggcgctgaggcaggagaatccctcgaacccaggaggcagaggttgcagtgagttgagatcacgccactgtactccagccgtgggggacagagcaagactccatctcagaaacaaacaaacacacaaaaccaataaaggtgtttcactcaaactgtcaggctcaggtctcttgacaggatacatccagcgcccagggaaacgtcgaggggtggggtggaatctattttgtggcctcaaggaagggtttgagagatagtcccgcaaacgtgacggcctaaggaagcccctccgcccaagaagcgatattcatttgtatacagtagccacccaggagggagaatcgggctctctacagaccccccaacccccaccccaccccacccctccgcctcgagaaatgagctctcgctctgtcaggctctattcacgccgtgtggttttttaacctccagtgtgtgtgcgtgggttgcggggtggggtgggggcggctgtggacagaggaggggataaagcggcggtgttccgcgggttcccgtgacgtaggacgtgagtggggtggccagagcctagttaactcatcgcctgtctggacgtctcccctcctggtcccctctctgacctacgctccacatcttcgcagttcagtggggaccttgtgtgtggaagtctccatccctttctactttagccgatgaaggccgggttctcaagagtctccccggagtcagggccttgggcaggctcacaaggatgctgacggctggtgacggtgatgtaagttggaagcctcgggccaatgcagaggtatccatttgacctcggtgggacaggtcagcggagtcccgtgcgtccttccggagactcatctagtgctagcaagcatggtcccgaggattccagctcccagcagaggcacttttgttcacacagaatcctgggcaggaaagttctcagcacgtttaggcctcctagccaaaaagtcaaagccacttctgggattttttttcaaagaaccagtgattccacaaggggccatgggtagttgtggaaatggagagacgtgtttacagatacatatttgagacagaacggacagggctcggtcacagttcatgtagaacacgagcagatgcacattgagaaaaccctcccagcatcctaggtgaacagaagtatgattttttgatacagtcgagggagacacaaccccagattttagggttggatctttattaatatgtagtatctatgaggtatccaagtccagaaagcaactcgccagttctgtacagcattctgtagggagatcaaacctgggatatctaaagttaagaattcaggccgtggtaatggattagattagatgtacttgaacttattttgcaaaggaagagagggcaggagatagcgagagccagagagtgggcgagagagagagagagagagagagagagacaaagacagagacagagagagacagacagagagacacaaagatacacaaagagagaaagacagaaagagggagagacagacagagaaagaaagagatggacagagacagacggacaggcagacagacaggcagagaaagagagtaagacagaaggcagacacacacacacacagagacagagacagatggacagacagagagaaagaaagagagagacagacagagagaaaaagagagagaaagacagagacagacggagggagacagagagaaacagagacagagagagagagagaaacagacaaggagagagagagacagacaggcagagaaagacagtaagacagaagacagacacagagagagacaggcagagagagacagactgagagacagagacagagaaacagacaggcaaagagagagagagaaaaaaaacagacagggagagagagagagacctaccgacagacagacaggcagagagagagacagagacagcgagacagagaaagagagatacagacagacagacagacaaagagacagacagagaaagacagagatggacagagagagacagagagaaacaaagagagagagacagagagaaagagagagagagacagaccggcagagaaagagtaagacagaagacagacacagtgagagagacaagcagagagagagacacacagagacagagagacaaagagaaagaaagagagagacagacagagagacagagaaagacatagatggacagagagaaagagaaagagagagagacagatacagagacagagagaaacagacagggagagagagagagagagacagacggacaggcagagaggaagagagacagacaggcagagaaagggaataagacagaagacagacacagtgagagagacaggtagagagagagagaaaaataggcagagagagagagacagagagagagagtagaaggagaaagagacagagagaggagtaggaagggcatgctcaggaaataattacacatattttataacgcttttgatcccataaatggtggccagggtgtgctttgaaaacaacaacaacagcaacaagagcagcagcagcagcatttgcttacggatttctagaacataagatgttctgaagtctagtaaacctcaaccggctctcactatacgttcagagattcacaaaatcgttagttaacaacaggagaaaaccgcagctaacatgtcttggggaaaatatacgtcttcctgaaaactggggatttctacttcatctaaaaagaaatacataagaaaaaggaaaaacacgaacaaaacaaaacaagccaacaaacatgggccaaggcactgtccctggaaatcttaagtgagcaaagtattagttttcagaaagcatttctattttgggcaaatactaagaaggcccagactagagctgtgacgtcattcccattgtgaaactatgctggccagagggcggagaaactaaaacatcatgataaaaggtgattgagacccagccgcggtgaagctttcctagggagggaggccttaggagggaagcgggggaaaaaccccacaactgcagacccgcccgcttgcccacgcaggtcaagggctatgccatcgaggaagctacctctggggaagtgggaccgtgccacctccatcttcaaaaacggtggccactgagtgagtcctgacgcccactgatgcaaatgtcagcctggcaagaatgagatcgccggcaaggggtgggggaaggggagagaagacggaggcacaccggggtggctccggaaggtttccaagcagggtgttgggaggcggggttggggggttttgggggaacccacctaactgactcactaaacgaaggtaaatggacgtgggtagtagggggagcctggggggacttgaaaattaaactggcccctcctaaaacccaaggagaagagtctatgcgcatgaaagaaaccaaaacacaaagaaaactaaagcgctgatcaaagaacaatagggccccagccagggcggaggttccctaggcaacgagggagagagggaggggtctccagaagggagagagagaaaccggttgccccaggctcggtgaagtgggccagacctccctccgtgtcacttcgactttcaataacagtggccgctaggtgatgcccaaagacaaccgatgcctgcaagtgtcagtcagcacggaaaagaacgcatttatttatttatttatttagagacagggtctcactcaatcttcagcccgggctgtgcagtggcgcgatctcggctccctgcatgctccgcctcccaggttcaagagattctcctgcctcagcctcccgagtagctggcattacaggcgcctgccccaccgcgcccgactcattttagtatttttagtagagatggggtttcgccgtgttggcaaggctggtctcaaactcccaacctcaggtgatccacccgcctcggcctcccaaactgctgggatgacagacgtgagccactgcgcccggccttaaccatgtatttttaagtcgaggagcctatcagggaaatacgagaagtagggacgccacacgtaacagagagaaagtttgaaaatgccccttccatccaagtggggacccggcctcgacctcccgaaatcatacaccgagtggcgaagcctagcaaggaccgtctgtctagattcctctcggcctctctaagcaggcgcttctcactttcgtggaagggtcagggccctccccggcacaggggctctgacagactaacagagaaagagacagacatagaaagacagagatggacagagagagacagagagaaacagacagagagggagggagagagacagacagagagagagagagagacagagagaaacaaacagaaagagagagagagacagagaaagagagagaaacagacagacacacagagacagacagggagagacagagagaaacagaaagagagagatggagagagagagagaaagagagggaaagagagagacggacagacaggcagagaaagagagtaagacagaagacagacacagtgagagagacaggcagagaaagagagagacagagacagagaaagaaagagagacagagaaagacagagatggacagagagaaacagaaagagagagagacagagatagagaaagagagagagacagacagggagggagagagacagacagagagacagagaaagacagagatagacagaaagaaacagacagagagcgagatggagagagagagggagagagaaacagaaagagagggggagggagagacagacaggcagagaaggagagtaagacagaagacagacaaagtgagagaaacaggcagaaggggagagagacagagacagagagaaagaaagagagacagacagagaaagagacagacagagacagacagagagaaacagcaagagagagaaacagagagagagtgagggcgagagagacagagggagagaaacagacagggagagagagagacagacagagagagagagagacagacagagagagagacagacaggcagagaaagagagtaagacagaagataggcacagagagagagagagaaagagagagagagaaagaaagagacagtccgggtgcggtggctcactcctgtcatcccagcactttgggaggacaaggcaggcggatcacgaggtcaggagatcgagaccatcctggctaacacggtgaaatcccgtctctactaaaaacacaaaaaattagccgggcttggtggcgggcgcctatagtcccagctactcgggaggctgaggcaggagaatggcgtgaacctgggaggtggagcttgcagtgagccaagatggcgccactgcactccagactgggcgacacagtgagactccgtctggaaaaaataaaataaagaaagagagagacagacagacagaggaagagacagacagagacagacagaaacagacagaaagagagagagacagagagagagagaaacagaaaggcagggagggagagagagacaggcagaggaagagaataagacagaagacagacacagtgagagagacaggcagagagagacggacagagacagaaagagagagacagacagatggagggagagacagagagaaacagagagaaagagagacagagagagagtgagagagagagagacagaaagggagggagagggacagacagagagacagacgggtagagaaagagaataagatagaagataggcacagagagagagacagagagagagtgagagagacagagagactcagaaaaagaaatagagagatagagaaaaacagagacagagagagacagagagaaacaggcagacagagagagacagagagaaacagacagaaagagagacagagagaaacagggagggagagagagagagacaggcagagaaagagagttagaagacagacactctgagacaggcagagagagagagacagagacagagagaaagaaaaggacagacagacagagaaagagacagatagagaaagacagagatggacagagagagacagagagaaacatacagaaagagggaaggtcctggcccagtagcgatacagtgccttttctttcattttctctttcttttctggttttcttttctttcctttcctttcctttcctttcctttcctttcctttcctttccttttcttttcttttcttttcttttcttttctttctttctttctttctttctttctttcatttatttatttatttatttggagacaaagtctcactctgtcgcccaggctgtagtgcagtggctgtagtgtagtgcagtgtgtagtgccaggctgtagtgccaggctgtagtgcagtggcgccagagacagagagaaagagagagacagacagagatggagagagagagagagaccaatcccaccatgaggaccccgaaatggtgtttgatttggatccctgtctagtcacctctctgtctgtagatgactgaggattccacaaatgaaggtcagcagtatctattgagctgtttctccctctcatgcgtctcatctgtgtggtggagaaagggaagaaaagaggttctgatgggaagttgtcttcatgcctgaggaagctgaaggcaggctgacgggaaggacggcatcctatgtgacatttccatacctgggcaccctttacaatgctggggctgccggtccacccagtacgtcaacccacccccaagaacagctagttccgggatgatccagtccatcccatccggctcatccggggcatctggtggaaggcttcgctggaggattcaaaagcagcatcaatgcggttcccttggggtcgccgggcaaaggccagatagaggagggtggtgggacgtgaaggggggcggggcatcggtcttagagctccctggaaggtggcaggcagctggtggaggacgctgagccagagacgtctggcaggatatggacctggaagccgcgtcagtcctttcccatacctctcccatgggaaatcccatggccgcagtgggagacttggctgggggagaagaggggacaagggggagagggaaggaggccctcgggaggatttagcaccgaaaacccacccagccaagctccctccctcctatggggtccaaggtacaccctgggaggtggcaagagaaaggttcaccccgtgctttttgtctttctctttatttttttcatcttttcaattttacaagagatgctcatttcaacaactagacggtggatgtgacgggagaagtgtcaaggccaggagtttgagaccagcccgagcaactgagcaacacaagtaggagagcccagctgaaaaaaatgaaaaaaagaaggaggaggaggaagaaagaaaagaaaagaaagaaaagaaaagaaaagaaaaggaaagaaaagaaaagaaaagagaaaaggaaaacaaccaccaagaaagttaaaattcttcaatggtgcaggcacaaaaaagagcgatttcacgtcttttcccacaacatggatagagctggaagcaagtatatacccagtgaactgccttctgcttacaagtgggaggttaacagtgggtacgcacacggtcatcaagatggaaatagcagacactccaaaagggaggaggagggtaagagggggacgaaggatgaataaatcgcccgtcggagacaacattcaccacatgggtatcggatacactggaggtccacttctacaactggaggcagtagtatgccgttctaacaaacaagcacatacaccacctgagtctgtaaaataccaaaacaatgacgacagcaccagcagcagcagcagcatcagaaacaacaagaacagaacagaagctggaacacaaaaccaccaccaccaccaccaaaatcaccagttgagggttgggggaggatggccgcgcttgaggccctcaggctcagtcccctcgggtttaaaaaagaaaacagcagactcattcctgtctgtagacaggaaaaatccaatcaaagttctccattgctaaaaagagaagtagaataaggagaaggggttattgatcttcttgtgatcgatcgagaccatacatgtagtaaaaaattaaattcagacagcaatactttctacactgttcaaaagcatcggagatcagacgcaccacactccatggggcttgtgccattagaaagaaaaggcaggccgggcgaggtggttcacgcctgtcatcccagcactttaggaggccgaggcgggtggatcacgaggacaggagatcgagaccatactggctaacatggtgaaaccccgtctctactaaaaatacaaaaaattagccaggcctggcttgggcgcctgtagtcccagctactcaggaggctgaggcaggaggatggcatgaacccgggaggcagagcttgcagtgagcagagatagcaccactgcactctggcctgggcgaaagagcgagactccgtctcaaaaaaaaaaaaaaaaaaaaaaaaagccaggcatagtgctgcatgcctgtagtcccagctactcaggaggctgtggtagaacaatcacttgacccagtagtttgaggctgcagtgagctatgatcataccattgcactctggcctggatgacagagcgaaaccccatctcaaaacaaagaacaaccaaaaacctacaagcatactcagagatagtgtgggtttggttctagacaaccacgataaggcaaatgttacaatcaagttagtcgcataaacattttgtttcccagtgcttataaaagttatgcttaaactatgttgtagtctaatgagtatttaataattaattattaattaattatttaattagtaatcgcattatgtctaaaaaactatgtacataccttaacttaaaatacctcattgctgaaaaataccaatgaatatctgagccttaccaagtcataatctttttgctggtgagtgaaggggtggcctaccctccacacttgtgggtatctctagtcaggtgggacgagagactgagaaaagaagtaagacacagagacaaagtatagagaaacaacagtaggcccaggtgactggcgctcagcataccaaggacctgcaccggcaccggcctctgagttccctcagtttttattggttattattttcattatttcagcaaaaaggaatgtagtaggagagcaggctgataataaggagaaggtcagcaaaaaacatgtgagcaaaaaaatctatgtcacaattaagttcaagggaaggtactatgagtggacgtgcacgtaagccagatttatgtttctctccacccaaacatctcagtggagtaaagaataacaaagcagcattactgcaaacatgtcttgcctcccaccatagggcggtttttctcctatcttagaattgaacaaatgtacaatcaggttttatactgagacattcagttcccaggggcagccaggagacagtggccttcctctatctcaactgcaaaaggctttaatcttttactaatccgcctcagcacagacccttaacgggtgtcaggctgggggacagtcaggtctttctcatcccatgatgccatatttcagactatcacatggggagaaaccttggacaataccccgctttcaagaacagaggtccctgcggctttctgcagtgcattgtgcccctcgtttattgagactagagaatggcgatgacttttaccaagtatactgcttgtaaacattttgttaacaaggcacatcctgcacagccctagatcccttaaaccttgatttcataaaacacatgtttttgtgagctccaggttgggtcaaagtggctgggacaaagtggctggggcgaagctacaaattaacgtctcagcaaagcaattgtttaaagtaaaagtctttttcaaaatggagtctcttacgtctttcctttctatatagacacagtaacagtctgatctctctttcttttctcttacagtgagggtcttgcctctatgttgatggctgctgactgatcaatgtgggggttgctgaaggttgggtgcctgtgtcaatttcttaaaacaatgaagtttgttcctttcacaaaatatttccctgtagcatgtgatgctgtttgatagcattttatccacagtagaacttccttcaaaattgaagtaaactgtctcaaaccctgctgctgctttatcaactaggtttatggaatattctaaatcctttgtcgttatttcaacaatgttcgtaacatctccacctggagtagattccatctcaagaaaatattttctttgctcatccataagaagcaactccccagttgctcaagtttcatcatgggtttacagcaatttaatctcatctaaaggccctaattctaattctggttgtcttgcgacttctaccacatctttagggacttcctcccctgacatcctgagccctcaaagtcttccatgagggctggaatcaacttcttccaaactcctgttaatgttgatatttcaacctcctcccatcaatcacaaatgtccttaatggcatttgctattaaggatatttgtgattcatgggaagaggttgaaatatcatgaagggattaatggtgaaacctttccaaaaggttttcaattcagtttatccagattcatcaaagaaattactatctatgacagctatacctttacaaaatgcatttattatttaataaaaacacttgacagtcagaaacactccttgatccacaggctgaaggatagatattgtattagcagccatgaaaataacattaatttccaagtacatctccatctaagcttttgggtagctaggtgaattatccataagcagcaatatttttccttttttcttttctttcctttttttttttttatttttggcctttatgtagtttccctcttgttgcccaggctggagggcagtggcatggtcttggctcactgcaacctccgcttccagggttcaagccgttcttctgcagcagcctcccaagtagctggaattacaggtaccaccaccatgcctagttaattttttttgtatttttattagagacgaggtttcatcgttttcaccaggctggtcttgaactcctgacctcaggtgatccacctacctccgcctcccaaagtgcagggattacaggtgtgagccattgtgcctggccaagcagcaatccctttaaagaaatcttgttgttgttgttgttgttgttgttgttttttctgagcagtaggtctcaatagtgggattaaagtattcagtaaaccatgctgttaacagatgtgttgtcactcagactgtgatgttccatttctagagcacagaaagaatagattttgcataattactaaaggccctgagattttcagagtggtcaatgagcactagctgtaacttaaagtcaccaactgcagtggtcctcaaagacagtcagcccatcctttgaagttttgaagccaagtgtggacgtctctctagcgatgaaaattttacatcttcactaagcttaatcattgctagctctggacttcaagtgagagacatgcaattcttcctttcatttgagctctttgaggccactgtgcttactaattaacacccccggcgggtgtcatcctcctccctcctcaatcgagttcacccacaccggggcatggggaacggggcttgccgcaccccacacgccctgcacgcctggggctctcccacagggggctttcgtgagccagggggcaagggccgttcccccgctccagcccagccaggctgcgtaggcagaaggcatctctcaacctgccccggcacgcagggattttgtgtttgctgccctggctcctctagaagtaggactgtaccaccctcagattcctcgttggcctccgcaccccaacaaatgccaggaggtccagtacccgcagcacggcagcctgctgggtgcatgctcagtgggacagcttgggtaccctcaagctaagtcacaggggcaaagtgtgtttccgccacccacgtcccaccggagtccgcggtggggctggagccccaggtcgccagggcggcgtgggaaaccgaagacggggcacctccacttccgaagctcgcgaccccagaggcctccgcgtcaagcacatatgcaagccatccaggcgcctcccaacccctccaggagccggggcgctcgtctacactcacccccagacagttagatgagctcctgtcaaccccagagtttcagcaaaaggcacaacctttcctagatcgagcgccactgcggggagctgaaggacgtggaagagctcgctctgctggaaccactccttagccaggaagaacaccgggctctgctggaggagctttaggacgcggggttggggcggggtaggggcagggcggcggcctctctttcgcggtgaacctctgactcggtatggagaggcgtgtcttcccttccagctgacctgcctaggatccctgagttccaggtcccgtgagagactccactcagaggagggctgtcattcttttctgagcatcccggggatcccagggcccgtccaggtaccgggaggcggactgtctactgctcatgcgcgggctagcaggcagtagcctaggttttctaactagcctaggtagagttctcatcccttccctcttgccccccactgcgttcttcagtggggtgggcggagacctccatcccgggaaacactggcccgggcaggcgccagatctgctcttctttccgcgtctctccaactctgcctcccccccacaccgtcactcgcctacccttgtcccgccagcttcctcggcatcaccatggagcgcctgacagctaaatgcagacccgagaccccgcgcaaacccgggtgctgccctttctatgcgggagggaactcaggcagagatggggagaggaacggagacagagagggagggagcgatgaagggaagaaagaacggatggaccgagggaccttggaaaggatggagggatagaaggaaggagagagggaaggagggagggagggagggaggaactgcgggagggacggagggaaagagggagggagggagcaagaaacagagagaggaaggcagagagaaaagcagtcttctgcctccaggaccagcaggatctctcactccgggaaaatgttgggtgcccagtgcaggctaagtgctcggcccacagccgcgtcggcctgcggggctctcacctgcccactggatcgccagcctgggttacttcatccgggagcgattcagaggatttccgcctcccagggaatgagcgaattccccaaagaacagagcagagacttgaatggttgtccgtttttcatccacagggttcacagatgacatatccccatgctgagcctgcaacagagcgcaaggcagatactcccacccacacaggagtcacactcaagccgagtgagccaagattccggattccacgttcctttgccctctgcaaggggtcctgctgctcacgtgtctctggcccccaaaagcgtgaccatgttgactgtttgtttcccgagctctgtggggacacagaaacctccagcgaagcatggaaacgcagcatcgtgtcttcgctctcctttcgtttccaaacaggccattttggagactccccatgttgcaggaaacaggaatccctcatcagtccgtgatgactcagtcccctgcccagactacaggcccaccaggcggcctcccttttgctgacactccaggccttcccccggctcgcgagctcccgagtttccaacacatcgggcgggctcaggacagggtgtgcttggaggcctcagggcccggggcccacagttctgggatcccctctggtcctccaccttgccgcggaaaaattgttttggatccctcaccacccctcctgcaaggccccctcttggcccacacacccagagccgtcagggttgcccaggggcgaacagccggcccagccccgcaggacctttttctcacaatgcccacaccatcatcgcttgtcccgacgaggacccgcccgtggccaacgggacaggaagggcctgctttgccccgcgctggcactaaagccccggcagcctgatcccgggaaaggggctgacggacacccagacacaccccaacactactacgagcaaacccaccccgacacacacacaggcacacatggacacacacacagacacacacacacacacggacacacaaagacacacacacggacacatggacacacgcacacggacacacacggacacacacacaaggacatacagacaaagacacagacacagcttgaaagagagctagggagaccgggatggagagatagaaatgcggggagagagagaaaagtagagggggagagagacagaaggtgacagaagagcgagagttggagggggatgtagagaaagggagagggtgaggaagttgtagagcgagagagacacagccttggagagggaggctctgctcaggtagacagggcactttgagcaggccagggtgaggtggagggtgcttgggccaggctagaacacggggtcagggccgcccacgcgggaaaaccaacggagccctgagacgtgtttttttttttttcttggattggttggtttctttggaggtgcgtttcatatggtccttcctttgtttgcttctttctgtctccttgatgcggtgggccccgagatttgtagagtgcacccgtccaactggtggaactatagcaccgagcttgtccacggggccaggtctgggtctctctcgtgtcctcgggactagagtttacacgacattggtggcaatgggaaacagggtgcacagggacggatttcttcgtggctggcgaagacaatgtccttcccccggggaaagcagcccacgggttctggagccgaggtcttggctggcaactgtgggacctgctgccccaacttcgatggttgcggcggcgcttgatgaatgaattgaattgcctggggtccggggagcgggaagacaccccggagggcaggaaacccgcacctgcgccttccaggtctactacctgctgcagcgccctggctggagccgggctcctggtggggctgcagccaggcaaaagaggtgggatgctgccacctggcggtattgcagctgcagacccccacgaggaggtttcatctcgacataaatcgttttctttcttcagctgatctgtatccctaattttagattaatggtaactccacaaatttagaggcacaaaatatggttgcccacaccttataatcgcattaccacctcccattaccaccacctttcccgctcctccccaccctcatcccgtagactaggtctcgcgatgtttcccaggctggcctcaaactcctgcgcttaagttatttgcctgccttggcctctcaaagtgctgtgatcagccctgtgagtcaccatgcccagccaaccaccacgaagttttgattcagcagcactgggttgtggagctaaggacccacaaatttagaaaagtttttaaatatcataacgtttctgtgaggaaatagtatttggtattacatttttagactcttttataatgttctggttttttccactgagtacagtactaagtagtaattggaaaatcacagcataagtcatattactttttctaatacagagtacttggctattctctaagctaaacctgatcacctacattgagtaaaagaaaaaaccccagagtgtgaggagacaggagatagtagccaaacatccaaataggtgggagtgaataaggcagatgacacagatgagatgaccaaaggtcaaggagaaagccagatcctaaagtgtggtttgcgaagctatgctccaatggaaatcttttccgagaagccctgatttctttctcttgctttcattagagacagacatcttctgccccttgctcttcaattttctaggactggacttccccttcaacgatcattcttctaggttacaaagaaaatcaaagccctttgcatggcttacaagggactggaggacctggctgcttgctgttttattgcttttgaggacatggggtcgtttgtgatttttaaggaactctatgttaaacattttctaatttccattttgagtcttgtctaaaatgtgtgagagtagtggagatattgggatttggtttagaaatcccagaaacaccacatccagatgtcgtatgttttctgctttataatttcatatcctgtgaaggtttcaaatgtgattctacagaaattcatactcaataatttaatcagaacactaagcctctgccccatataataaaaccaaatattatcttacttcaaaattttaagtttttggtatgtattgaggctaacactgtaaacactctgtgccataattcctaaactgtaatacggtttaatgtatctactttctacatttaaaacatgtactttgccattgaggaacttagaatattgctgagcatgtattaaatacccatttttttcttgatttttaaatagttatcattttatagttttctcttgtttagtttgaagcttactaggatttttgtcattgatatgtatgtgtgtatatatatatatatatacacacacacacacacacacaagtatttacataacatatgtaattgatatatatgtatatgttttatatatgctttatgcacacttatgggaatatatgcatgtgtacataacattaattttttgaccaataaaaattacataattatgtattgtgtatattacaaaagtttgataggtatatatattgtaaaatgtttaatacaattaagttgatgaatatttatgtcaccttacatggttatgttttttgtagtgagagcatttaaggtctcctactgttgtagcaaattttaagcatacaaaacactgttattaactacattttaaagctataccttagacccccaaaacttatttatcttataactgaaagtttgtactctgaacaccttatcgttttttctacctccaggcctggtcattaccattgtactctctgcttctatgagttcaggctttttaaattctccatttaagtgagaatatacagtgtttgtctttctgtgcctggcttattttgtgcagcataatgtacccaggtccattcatgttgttgaaatagcagaatttcattcttttttatgggtgaataatatttggttgtctttttataccacattttccttatccattcagcttctacagttaagtctttttttaaaaaaaaatacccttgatggttgtgaatatgctgcattgaatataagggtgcagataatttttgagatgctgattttattttgtttatagacagaagtggaatttcgggattgtacgatacttctattttttaaaataacctgcttactaattttcataatgactcttccagtttgcaactcattaagactgtacagaaatattttgtcacatccttgttaacacttgtcatgtttcttttttttgatattagccattccaactgctgtaaactggtatcttttgatttgcaattttctcatggatggaatgttttgcatctttctacacacctgttggccatttgaatatgtttgtaaaaaatatttagtcttggtcagtggagccaagagggccaaagaggaacagctccagtctacagcaaccagcatgagcgatgcagaagatgggtgatttctgcatttccaactaaggtaccaggctaatctcacaggggagtgccggtcagtgagtgcaggacagtgggtatagtgcaccgcacatgagccaaagcagggtgaggcatcgtctcatctgggaagcacaaggggtcagggaattccctttcctagtcaaagaaaggggtgacagatggcacctggaaaattgggtcactcccaccctaatactgaactttgtacaaccagcttcacaaacagcacaccaggagattatatcctgcacatggctcggagggtcctatgcccatggagccttgctcattgctagcacagcagtctgagatcaaactgcaaggtggcagtggggctggtggaggggcacccacaattgctcaggcttgagtaggtaaacaaagtagccaggaagcttgaactgggtggagcacaccacagctcaaggaggcctgcctgcctctgtaggctccacctctgggggcagggcacagacaaacaaaagacagcaataacctctgcagacataaatgtccctgtcccacagctttgaagagagtagtggttctcccagcgcacagcttgagatctgagaatgggcagactgcgtcctcaggtgggtccctaaaccccgagtagcataactgggaggcacccccaagtaggggtggactgacaactcacatggctgggtatgcctctgagacaaaacatccagaggaacaatcaggcagcagcatttgcagttcaccaatatccactgttctgcagccaccgctgctgatacccaggtaaacaggatctggagttgacctccagtaaactccgacagacttgcagctgagggtcctgactgttagaaggaaaacaaacaaacagaaaggacatccacacaaaaaaacccatctgtacgtcaccatcatcaaagaccaaaggtagataaaaccataaagatggggaaaaaacagagcagaaaactggaaactctaaacatcatagcatctctcctcctccaaaggaacgctgtgcctcaccagcaacagaacaaagctggacggagaatgactttgatgagttgagagaggaaggcttcagaagatcaaattactccgagctaaaggaggaagttcaaaccaatggcaaagaagttaaaaactttgaaaaaaaattagatgaatggcttactagaataaccaatgcagaagagtccttaaaggacctgatggagctgaaaaccatgacacgagaactatgtgatgaatgcacaagcctcagtaaccgatgtgatcaactggaagaaagggtatcagtgatggaagatgaaatgaatgaaatgaagcatgaagagaagtttagagaaaaaagaataaaaagaaacgaacaaagactccaagaaatatgggactatatgaaaagaccaaatctatgtctaattggtgtacatgaaagtgatggggagaatggaaccaagttggaaatcaatcagcaggatattatccaggagaacttccccaatctaacaaggcaggccaacattcacattcaggaaatacagagaatgtcacaaagatactcctcgagaagagcaactccaagacacgtcattgtcagattcactaaagttgaaatgaaggaaaagatgttaaggacagccagagagaaaggttgggttacccacaaaaggaagcccatcagactaacagctgatctctcggcagaaactctacaatccagaagagagtggggaccaatattcaacattcttaaagaaaagaattttcaacccagaatttcatatccagccaaactaagcttcataagtgaaggagaaataaaatcctttacagacaagcaaatgctgagagattttgtcaccatcagacctgcaataaaagagctcctgaagcaagcactaaacatggaacggaacaactggtaccagccactgcaaaaacatgccaaattgtaaagatcatcgatgctaggaagaaactgcatcaactagtgagcaaaataaccagctaacatcataatgacaggatcaaattcacacttaacaatactaaccttcaatgtaaacgggctaaatgcttgaattaaaaggcataaactggcaaattggataaagagtcaagacccatcagtgtgctctattcaggaaacctatctcatgtgcagagacaaacacaggctcaacataaagggatggaggaagatgtacaaagcaaatggaaaacaaaaaaaggcaggggttgcaatcctagtctcagataaaacagatattaaaccaacaaagatcaaaagagacaaagaaggccattacataatggtaaagggatcaattcagcaagaagaactaactatcataaatatatattcacccaatacaggagcacccggattcataaagcaagtccttagtgaaatacaaagagacttagactcccacacaatagtaatcggagactttaacaccccactgtcaacattagacaaatcaacaagattgaaagttaacaaggatatccaagaattgaactcagctctgcaccaagcggacctaataggcatctacagaactctccactccaaatcaacagaatatacattcttttcagcaccacaccacatatattccaaaattgaccacatagttggaagtaaagcactcctcagcaaacgtaaaaaaaaaaaaaaaaaagaaatcataataaactgtctctcagaccacagtgtagtcaaactagaactcaggattaagaaactcactcaaaaccgctcaactacatggaaactgaacaacttcctcctgaatgactactgggtaaataacgaaatgaaggcagaaataaagatgttctttgaaaccaatgagaacaaagacacaacataccagaatctctgggacacattcaaagcagtgtgtagagggaaatttatagcactaaatgtccacaagagaaagcaggaaagatctaaaattgacaccttaacatcacaattaaaagaactagagaagcaagagcaaacacattcaaaagctagtagaagtcaagaaataactaaggtcagagcagaactgaaggaaatagagacacaaaaaacccttgaaaaaatcaatgaatccaggagctggttttttgaaaagataaacaaaattgatagaccactagcaagaataataaagaagaaaagagagatgaatcaaatagacacaataaaaaatgacaaaggggatatcacgactgatcccacagaaatgcaaactactgtcagagaatactataaacacctctacataaataacctagaaaatctagaaaaagtgggtaaattcctcgacacatacactctcccaagactaaaccaggaagaagttgaatctctgaataaaccaataacaggctctgaaattaatgaaataattaatagcttaccaacaaagaaagtccaggaccagatggattcacagccgaattctaccagaagtacaaggaggatttggtaccattccttctgaaattattccaatcaatggaaaaagagggaatcctccctaactcattttatgagaccaccatcatcctgataccaaagcctggcagagacgaaacaaaaaaagagcattttagaccaatatcgttgatgaacattgatgcaaaaatcctcaataaaatactggcaaactgaatccagcaacacatcaaaaaacttatccaccatgatcaagagggctttatcctggggatacaaggctggttcaacatacgaaaatcaataaacataatctagcatataaacagaatcaaagccaaaaaatacaagattatctcaatagatgcagaaaaggcctttgacaaaattcaacaacttttcatgctaaaacctctcaatagattaggtattgatgggacgtatctcaaaataataagagctatctatgactaacccacagacaatatcatactgaatggacaaaaactggaagcattccctttgaaaactggcacaagacatggatgccgtctctcaccactcctattcagcatagtgttggaagttctggccagtgctatcaggcaggagaagggaataaaaggcattcaattaagaaaagaggaagtcaaattgctcctgtttgctgatgacatgattgtatatctagaaaaccccgttgtctcagcccaaaatctccttaagttgataagcaacttcagcaaagtctcaggatacaaaatcgatgtgcaaaaatcacaagcattcttatacaccaataacagacaaacaaacagagagccaaatcatgagtgaactcccattcacaattgcttcaaagaggataaaatatctaggaatccaacttacaagccatgtgaaggaactcttcaaggagaaatataaaccactgctcaatgaaataaaagaggatacaaacaaatggaagaacattccatgctcttgggtgggaagaatcaatatcatgaaaatggccatactgccccagataatttatagattcaatgccatccccatcaagctaccaatgactttcttcacagaattggaaaaaaactactttaaagtttatatggaaccaaaaaagagcctgcatcaccaagtcaatcccaagccaaaagaacaaagctgaaggcatcatgctacctgacttcaaactgtactacaagactacagtaaccaaaacagcatgatactggtaccaaaacagagatatagatcaatggaatagaacagagccctcacaaataatgctgcatatgtacaactatctgatctttgacaaacctgagaaaaacaagcaatggggaaaggattccctatttaataaatggtgctgggaaaactggctagccatatgtagaaagctgaaactggatcccttccttacaccttatacaaaaatcaattcaagatggattaaagacttacatgttagacctaaaaccataaaaacactagaagtaaacctaggcaataccattcaggacataggcatgggcaaggacttcatgtctaaaacaccaaaaacaatggcaacaaaagccaaaattgacaaatgggatctaattaaactaaagaacttctgcacagaaaaaaccaccatcagagtgaactggcaaaatacagaatgggagaaaatttttgcaacctactcagctgacaaagggctaatatccagaatctacaatgagctcaagcaaattaacaagaaaaaaaacaaacaaccccatcaacaagtgggtgaaggatatgaaaagacacttctcaaaagaagacatttatgcagccaaaaaacacatgaaaaatgctcaccatcactggccatcaaagaaatgcaaatcaaaaccacagtgagataccatctcacaccagttagaatggcaatcatcaaaaagtcaggaaacaacaggtgctggagaggatgtggagaaataggaacacttttacactgttggtgggactgtaaactagttcgaccatttcggaagtcagtgtggtgatccctcaaggatctagaactagaaataccatttgacccagccatcccattactgggtgtataccccaaggattataaatcatgctgctataaagacacatgcacacgtatgtttattgcggcactattcacagtagcaaagacttggaaccaatccaaatgtccaacaatgatagactggattaagaaaatgtggcacatatggaccatggaatactatgcagccataaaaaatgatgagttcatgtcctttgtagggacatggatgaagctggaaaccatcattctcagcaaactatcgcaaggacaaaaaacagacaccgcatgttttcactcataggtgggaattgaacaatgagaacacatggacacaggaaagggaacatcacacaggggcctgttgcggggtgggggaggggggaaggataatattaggagatgtacctaatgctaaatgacgagttaatgggtgcagcaaaccaacatggcacatgtatacatatgtaacaaacctgcacgttgtgcacatgtaccctaaaagttaaagtataataataataataaaaaaagtttagtcttttgctgttttttagttgggtattataattattattgtttagcttctgatttgtatgagtttctgctatattttgaatactaacctcttatcatatatggtttgcaaatattttatcccatcttaaatgttttcttattttttgctgtgcacaataatttaatacactacaactttgtgtctggttttattgctatacttttgatatcatatttaaaaaaacattgccaaggccagtatcatagttgctattcgtatgcttttctaaagattttcttttaaggatttatgtattaaatttaagtctttattttaagtcaatttttgtgtctggtgtaagaaatatgatcaagttttattattgtgcttgcgagtatccagttttcccagcactaagtattgaaaaggctacagtttttatattgcatattcatagtgcccttgtcaaagattaactttagatacatagatttacttctgggctctgtattctgttccattggtttttgtgtttgttcctataaacattccattccattatgtttactgttgtcttgaaatgcagttttaaataataaagtataatgtccccagattttgttttattcctcatgatagctttggccattcaatatttcttatagttttatatacattgcagactttattttccattactgtaaaaagtggcacaggaattttgataggaagttgaattaatctacagattgctttggataatatggcacttagacaatattcttctaatccatggacatgtaatatatttacatttatttgtatcttctttattttttatcaatatattttattttttattgtaaagatctttcaccacattggttaaatttattgctaagaaatctattattttgttgctattgtaaatgagattttttttcttttttactggtttgttgctaccatatagaaacaaaactgatgtgtgtatgctaattgtatattctgcttcttcactgagtgcatttattagatgcactatttatatatagatgcattaaacgcattatttaaatgtagtatttatgtttttttaaatataacattatgtcatttacagactgtgacgttatttcttcttttcaatttggatcttttagtttttcttgcttaattatttgatgtaggacttaattgttctactaggacttccagttctatgttaaaacagaaccgttagaatgggcataatatagacttgcattggtgtttgcacatttgaaggagaaaacacctcgtttcattttttgttgttgttgttgttgttttgtttttgagacggagtctcgctctgtcacccaggctggagtgctgtggcacgatcttggctcactgcaacctccacctcctgggctcaagcaattctctacctcagcatcccaagtagctgggattacaggcgccaaccaccatgcctggctaattttggtatttttagtagagacagtgtttcaccatcttggccaggctggtcttgaactcctgacctcttgatccacccacctcggcctcccaaagggctgggattacaggtgtgagccactgtgcccagccacctctgttcatttttataaactgattttagtaggtaaagatcttcatctgttgggtctcaaggctgatgagatctttactgggtttgcagtaaaaaggctcgtagctgtgtcacaatgtggctgccgaatctgaagtgggtgttacctttagtgggcttgttaccaggagcacgtgtggttgtgagttctgtcatgtttttgggcaggctggattgtcttcagggctttgttttgtggagcaggcactagggcaggttctgctatatgctgggcctaatagcagatgtgtgggtgagtgtggctcccactgagtacctagcaggttttccccaggttatctacaaacagtgacttttgaactgttttgtgtgagtcacgagtatgatgtccccagcttttttcttattcctcatgattggcttggccattcagcctacattgtaggcttgcattttctattactataaaaaatggaacagggattttgatagggatttgatttaacttacagattgctttggataatatgataccttattaaccaaaggccctgccttctcaaaatggcccttttcgatcttgggttttagcaaggtttcataatgccttgtatcccaaagcttactatattgcacaggctgtttttgaactactggcctggcagtcctcccgcctcaggctcctgaatcgaggagattactgtcatgagccactgtgcctggatctctcataaagttactttcgttgatggatggctgactagtttttattgctgcaggggaatacaacagtagagaccccctattccaccaccttgataatgtcactctctccatacacttcttccttattttgttctcttgtatgtttgtgtgttattttaggttcaaatattaagaccaataggctaggatttatacattctgtaaaaagtaaattagatagctagtaggtaccatatatatatcataatgtttacccataagattaagtttagtgcaggcaaaaaggactcattaaaattttcatccacttttttcaacctctatccaaactataatttatggcccaatttttattttatcaattacccttaaccatatttcataaaatttacattttttctttatttagaaatgtgaggctattatttgcttttaaaggctgtaatacagcttttttattttgtgaaataatagtaccaatattataaatattcatagtgtaaatacttattcattaaaatcttcccattagagaattttattaattattgtagtgcatttctgtaaaattgtaccgccacacaccacagggcaatgattcaaagtgcctcgtcttcacagatgcacagtcacagttgaacattgtagttatttagaaaaattcttttctagtgttatatcaatgttccaaacaagattttatgggaaaatatttctcccattctagttttgcaattccatgttaactgtatttttattttagggtagattccttgacattggtttatactatatttggttttacctaagtattattttggatgactgtgtgcagcaacttttaacgtacagtttatgtcaatgtgcagtttaattacaatatgaatcagccatatatttattcacaattcaagtttaacaaacttaatgaaaactaagcaaactaacgttacatgataaagccccaatcagctatcttatacttaagcaaatacaccaaaaaatagtttgtagctttattgctacttttgttcaaactatgttttatattccctatgaccaaggaaatttctgacattgtcctaccaggctaaagaaacaaacaaaaagacaatgattatactttcaagtagcagtttgtttagagccccagatattccatctgtagaccactatgctcatatttgtttgttttattaaggctgtagcccaaaaccttccatttttgtggaaattaaagcttttcaattccatactaaagacaggacagcctcatgatctaaatccaagggtgatggtttagagtgaggatgatttcttgttgacacggagatggttgagttcttctacaataaatctatgggagaggcaggttgtgatgagttggaagtgttggttgccttcatggtctcaaagttctctgtcaagttcacctcagcactgctgtactcctgttctgctgtcaggttgggaatgcttggccagcagtggttctccacacggtcctcaactgccggtgcttctctgatccactgcctgccagaaatgcaattgtagcagagtaggctggcaaggggacacaagccagagatggtaactggccaccgcctggctgggcaagagaggggtgggttctcaatcctagctcacatgccaactgccattgtcattccagcacccagtggtgtcccccataatgtgcactgcctggtctgaggtaaatggaatgctcagctaaggcctaaagttgaaaaggggctttccagagcccccagtgtgctgggcatctcaccagccatggaaagagtctgtgtccttgtggccagacaggcaataatgggagcctgcccacatttcagggccttctggagttttcacttgagagttcagctctggcaacagaggacacttctggtgtccagagattctcagtgcctggaggatgtaaaactgattgatggcatctgctggcttctgggagcactgcttggccatgcttatctgtgggccccagccaaggcactgcagaaatcttggtctctggctaacattctggactgtgagacagcgtggctgcagctagcactggatggagagagtacagtgtggtgaagtggggacaatgggcattctgccacatggcctagggtttcttgtgactctggactgcccaggtgcggtgaccagaaggcaaaccatttctaggccacagctcaaggagggacaacccaaactgagcctggtgatggtcctgagttgagcagatgaagctgggagtccagggagactaaagaagctcagataaactctgcagggcagagtattcagggcatgaaaaggacaaagtcacaaaacaaaaagctccagagtcttcagctaaatactgatcagcacatgtatgtgtgtaaactacaagtctggggggaaaaataccggaaggaaacagaaagaagaatgcttgaacctcccacagaaccaggcatatttgttgttcccaccagcaacagtggacaaatcttatacttccgagaccattggatggaacactcagaaaataattgcctcagtagtgtggaagattagatctaggccgaggctgctaaggtcctacttaacaagacctcaaagaaaaccctcaaagaaccaaaatctttccagataatttaactgcatcttagaacatagctaaataatatttataggaacccaacaatatccaacacacaataagataaatttcatgttgtctgccatccggctgaaaattaccagacatgtgaagaaaaagaaaatgtctcaataatgggaagaaaacttgatcaatagatacagaaatggcaaataagatggaattagtaggcaatgatattaaagctgttattgtaatgataacattccacaagaagaaggtaaagggaagctagaacatggaagtagagacatggaagatccagcttgaacttctagagatgaaaaatacaatgtctgagatgaaaaaatactaaatggcatttaaaatagaatagatattatacaaaaaaggattagtcaactggaagatgtagcagtagaaactatcaaaaatggaacgtggagaaaataatggaaaaaattgaacagaaaatcagcaccaacaggactaatatatgtgtaattggagttcctgaagaaggtggagagaagaaaaaatatttgaaaaaaactgtggctgaaaaaatttaaatttgagaaaaactgtaaacccagagatctaagaaccaatgaacctctagcacaagagacatgaggatgacacactgatgcacatcataatcaaattgccccaaaccagtgacaaagagaaaatctgaaatgttaccaaagggaaaaggacattacacagagagaaacaaagatgaaaataggctgagcttggtggctcacacctgtaatctcagcactttgggaggctgaggcaggatgatccttgaacccaggagttcaagaccagcctgggcaacatgacaaaaccccgtctctactaaaaatacaaaaattagcagggcatggtggcactcatctgtaaccccagctactcaggagactgaggcagggagaattgcttgaacctgggaggcggaggttgcagtgagctgagatggcgccattgcactccaccctgggcaacagagtgagactctgtctcaaagaaaaaaaaagaaaaatgatggcagacatcttgttagaaacaatgcaaggccaggcgtggtggcacatgcctgttatcccagcactttggaaggccaagacaggatgatcacttgagcctcagatcctgcttctgtgaagtggtataatgttgatggcagccaatgctaagtgaaatacatatactgtattattctgttcttgcactgctataaagaaatgtctgacacttctcaaaagaagacatttatgcagccaaaaaacacatgaaaaaaatgctcatcatcgctggccaccagagaaatgcaaatcaaaaccacaatatcatcactggccatcagagaaatccaaatcaaaaccacaatgagataccatctcacaccagttagaatggcaatcatcaaaaagtcaggaaacaacaggtgctggagaggatgtggagaaataggaacacttttacactgttggtgggactgtaaactagttcaaccattgtagaagtcggtgtggcgatccctcaggtatctagaactagaaatatcattttacccagccatcccattactgggtatatacccaaaggattataaatcatgctgctataaagacacatgcacacatatgtttattgcggcactattcacgatagcaaagacttggaaccaacacaaatgtccaacaatgatagactggattaagaaaatgtggcacatatacaccatggaataccatgcagccataaaaaatgatgagttcatgtcctttgtagggacatgaatgaagctggaaaccatcattctcagcaaactatcgctaggacaaaaaacaaaacaccacatgttctcattcatagctgggaattgaacaatgagaacacatggacacaggaaggggaacatcacacaccggggactgttgtggggtgggggaggggggagcgatagcattaggagatatacctaatgctaaatgacgagttaatgggtgcagcacaccaacatgacacatgtatacgtatgtaacaaacctgcactttgtgcacatgtaccctaaaacttaaggtataataataataatttaaaaaataataataaataaattcaaagaaaaagaaatttctgagactggggctgggcatggtggctcacgcctgtaatcccagcactttgggaggctggggtgggtgaattacgagttcaagagattgagaccatcctggccaacatggtgaaaccctgtctctactaaaaatacaaaaaaaaaattaggtgggcttggtggcatatacctgtagtcccagctaagctacttgggaggctgaggcagcagaatcacttgaaccagggagacggaggttgcagtgagccgagatcgcaccactgcactgcagcctgggcgacagagtgagactacgtctcaaaaaaagaaaatgagactgggtaatttatgaagaaaagagttttaattggctcacagttctgcaggctgtacaggaagcgtgattctgtcatctgctcagcttctggggaggcctcagggagcttacaatcatgacagaaggcaaaagggaagcaggcatatcttatgtgactggagcagggggaagagagtgagggggaagtgccacaaactattaaacaaccagatcttgtgagaactcacttgctatatagtaccaagcggggatggtgttaaaccatgagaaactggctccatgatccaatcacctccctccaggccccacgtttggcattggggattacatttccacatgagattttggtatggacacagatccaaaccatatgatataccataaaccatagagcaatgattaaaactcaaaaccaaaccaagcaaaaatagttatatgtaaaaggccaacaaagaagattaaatgaaataaaaatactcaacaaattcaaaagaagtcagagaaagaggaaaaggagaacgaactacagatgggacaaatagaaagcaaacaggaagtagaccaattaaaaccaaactctctggcattccaccagttgcgtgtgattatgtagcaactctttgcctccgacaacaatacctgtcacacagggttgtcatcagagcttgccacatgtgatatggaaagcctgctgtttgcagaaccgcaatcattatacagtagctcttatcgttggtagcagagacccaggtctctgtgttggtcatgctgagagctttccttctcattgctctgttttcctcctactttgatccctttctgtatttccacgccccacaccatctggctggagaagattatcagcctcccggtctacaaatgttcaaagtccatgaatcaaatagcaaacaaatgtatttctgtacgtttatctgctacgcagggatccaggagaaatgctttccttccttcaagaagtccgtggctgctgatgccaagaatgctctctctgtcctcttctcttttctgatctgcatattctctgttgccctgcacttctgggaagactttacacagggacaactatgagtttttgtaagaagatgagaaatcaccactttgggaaccatccattagacgttccaatattgctgcagatagggactctatcatgttctcttcttctctgacacccaccccttcccccattggccacagcaacttgggtttgctcttcagctacggcagtgcctacccctggggaactgtgacttgctttataccctatccaataacacagtgcgtccttatacacagtaagtgttcaatatacatctgttgaagggatttcatcacagttaaatctgtggagagttcagcagataagtgagttgctcaagatggtcagaggctgtcttcttccatttgggctgccgcaacaaaataccttagcctagggggcttataagcagcagaaatttatgtctcataggtctggatgctggcaagtggaaggtcaaggtagtggcagactgggtgtctgttgagggcctgttccttatagagggcacctcctagctgtgtccttacatggtggaaggagaacaagctcccttggctccgttttacaaggccacttatccattcatggggtctttgctttcatgatgaaatcacttcctaaagtatttgcctcctaattcaaacctaacctatcaggggttaggtttcaacacatggattttagggacataaaatcattgactatagcagagacatagctggacctgggtctgggaccttctgggtccagctccattatgacacttacactgcacatggtaccccaaatgatgtaattctgttctgtgacattgtgcccatgaggcagggacacagtagaggcctctgcagacatggtttgttcttgggacgtccacctggctttgtgctgtaggcctggaagaattcaccagctgcccactctcatgcctcactcaggttcgtgggtccctccaggcacatgtcagatagcccactcaattttttacttgccccatttccctgggttcccttctgaactcagggaccatggagggagttgggagtctctgtttttagttcatgctcttgtcttctatttgagaacaatgcccaggcaaggcaatctctttcctactgttttctaagaacatcaggggcttcctccaaactcttcacccactccctccactaatcccttctccctcagggacacagggcacaagcccacctcctgtgtgaagatcctgccacagggtggttctttggttttctgcgggtatccagacaagaagctaaaggtgaatgcactccggaatccaggagcactggcgattttctctccttagctcagcgagcaaccccacagatacccctagccccaccccgggccacttgaatccatacaataaaatgtatgtcagtttgttcaactaaggaccccgctgagtatttactccctatttaaagatgatgtttattttatttttgagtttaaattaatcagcctcaggatacagaattagataaggctgggatttagctccccttgagtgatttatttcacatcaagccttcttaactctttggctgcagaggggaagtgcctgtatctttctctgcagagttgcctagggctggccaggtgaacagacacgctccctcctctccatcgtgccagccagggcacggtgtgtgcttatgatgcagcgagttagaatactaaccttttcatcacaatagtcataaatcctcacacaaggaaatagagataatatacaagtaggaaaaaaagaaaaagaagcagtcttgaattctgctacctaaagataaccattgttaccatgtaggcaagcttcctttcatgctgtgtcaagtgtttaaaaaatatggctcaatattacaaacacacaggactacgtagaggataattatatcaaactttcatgtacctcccagttaaaattcaaacgtggtagcttttggatgcatttgctccagagtttaagggaagaaaactacggattcagccataatgttcacgctgacgcttgagttatatgtcccttttctagtccagttacctcagccctccccactattctgaagtcaatgtgtgtctttccatccatgtttaatacctagtgtgcatgtccatgaagaatggatagtgttccttggtctgtttttacaattttatacaaatagtagtccatacatattctcctgaaagttgcttttcccttcaacaatatcttctagatgaatctagaattctgcatttctggtgagcagaagatgggcgaaccccctgcaacccccaccccaaggtgatgctgatgttctggtccaaggcctgcacgtagcttggtgaggcttggggtcttgggacaggtctgttgtcagcccttccttctgaggaagcacagccagatgaccttggggctggagacctcactatgcccctcgccagcagtgcgcacatccgtcttcactcatcttcatcaatatttgttatcacactttctgatattgttcctggattttgctgtgcagctgaatgcgtgccttgtgtttcccagcccttcgggtctccttctctgtgaattgctcctggcccatatgtctgttgggtctttggtttctccttgctgacttgtaagtgctatttttttttttttagatggagttttgcacttgttgcctaggtgggagtgcaatggcatgatcatggctcaccgcaacttctacctcccgggttcaagcgattctcctgcctcagcctcctgagtagctgggattacaggtaagtgctaccaagcccggctaattttgtatttttagtatagacggggtttctccatgttggtcagactggtctcgaactctcgacctcaggtgatccacccacctcagcttcccaaagtgctgggaatacaggcatgagccaccacgtctggccaattttgattttaatgatctggatatcgatgcttttttggccaaataccttacaaatatgttttccctattggtgcactgtattagtccattttcacactgccgataaagacataacccagactgggaagaaaaagaggtttaattggacttacacttccacatgactgaagaggcctcagaatcatggtgggaggtgacaggcacttcttacatggcagtggccagagaaatatgaggaagatgcacaagtggaaccccctgataaaaccgtcagatctcgtgagacttattcactaccaggagaacagtatgggggaagcgcccccatgattccaattatctaccaccaggtcccacccacaacacaggagaatgatgggaggacaattcaagatgagatttgggtggggacacgcagcaaaaccatatcatgcactgtctttttcttttaactttattcatcacctcttttgtcagatcaaagcttctacatttaatatgattgaatttatcagtaatttcttttatggtgtctgtgttttgtgtcatattaaaaaaagtttttctctgcttagtgtcataaaatctgtcctctcttttattctaaaaattggaaatctgcttttcacatcttgttttatttcctttgttctttgattcgtagggatgtgaggtagaattatctattagttaactcttgctttgtaacaagtaactccacacctcagagacttatgaccataggccaccatttctcactcatgagcatgggttgcttgggaggtttcagctcgaactgtggtggctgagctggatctgctccaagtgtctctgatcctcctggggttggggcctgccagggtgccttcttctcatggcaatggcaggagtgcaaagaacaaagggaaatgtgaaggtctcttatcttaccacccaggctcagaatgggcagactaccactttaccacatccattcaccaaagtgagtcacgtggccaaaccagaagtcaagggcaggaagtttaagtatgaatcccatctccacgtgctatgatttcctgggctttcaacttcttgaggctgaattgttttattctcacctccccagcctgcagaaaatacattttctccaggacttgctgagccatagggcagaataattgtagttgacaaggactagatggaactcaaggctccagcctctgtgcagtggacaggtgccttctggccactgaggccacttccttccccttgtccccatctaggtcctctgttctgcaccaatctccctgtcattctgcccaggccttccaggaatcagcctcttaatagttcctggcttcgttccctctctttatttctattatgtgagtgtttccatccttatttggtgtaggaggactggattgagtcaactcagcctgtcacgttcccagtctcagcacctgggtagccctgagtgttcagcatgagtggggtcccccggtgtctccctccacagcacgttctgaaggcataggagctggactgacatttgggacacctaaacctttgttccacttctgccatgacagcttcattggtccaggcatatcatggcagctctctatgcctcatttttttattcctcacacaatggaatgacataaccctcagtgcttacctaaggcaggagacatgattcccctgccttctccccatttctgcatttgccagagcatcagatttttgtgtctggccaagaatatagtgaaggaagagcaggtaagctttgggcacaaagaggacatttaagggtttcacttaaggaaagaaagtcagggggcagagaggggtggtggagcatgatcttgggccaatgatgaggaactaatgacgtgcaatgctcttgggttaggttgtgtagcagcctgggtcccatcaagagatagaaaccacatagtgggtctaacagggaagtgtggtataaaggattgcaactgtgataaaagagtcactgtaagacataaagcaactctgactggtgccctagtgcagagggaggtacccaaggaagcacagatttgaaaggtgttcagatgtcacaaaatgtggttcagccaccacataagagacgttcgtggatttgggcaggctggagctagtcagcagctgttgcacaagcactaggccacccactggagtgcaggtgagggagctggccgtgaacggctggaatgcaggggagggagccggccgtgagccgctggtgtgcaagggagggagccggccatgagccactggtgtgcaggggagggagccggccagagccgctggtgcaggggagggagccggccgagagccgctggtgcaggtgatggagctggccatgagccgctggagtgcagatgagggagctagccgtgagccgctggtgcagggatgcatggcgggagtctggctgcctttgtagggcaggaagcctccagaatgcgagtcccacagggtctggcagaaggaatggcagctctgtgtggaccctctagaatacaggtcactgtgtgcaggttgcacaaggggtacaagagggggtctgggaaacttttcaggaactttcagatcacatgggccctgctgcgttttggtttccatgtcgagatgttgcaagccaaggctacaaggtggctgagggaccacgcctaggtctgtggttggggcttgaacatgatcaacgcccaggcagagagctcctgccccctgcagtctctccatcctctgcctagatgcctgcagaatgttcacttccagaaggtatattgaacagtgtttcccagtttatcacagtgcacgtattgaaaggtgcactaggagctgggaggcaacagactgaaaactgacactggagacgctggctcatagcaacgaagagaagctgaaaaggagtgggaaggaactaactgtaattttacatcaatgatctgcatctttgtttcgatggtttgtggcaaccaaaatgactattctttctaccctcctagttcagtcatagccttagagtttttttttttttttttttttttttttttttttttgagatgaagtctcattctgttactcagactgggatgcagtgaccttatctctactcattgcaatctccacctcccaggtccaagtgattctcctgcctcagcttccagagtagctggggctaacaggcaccctccaccacgaccggcaaattttcgtataatgagtagagatagggtttctccatgttggtcagactggtcttgaactcccgatctcaggtgatctgcccgcctctgcctcccaaaatgctgagattacagatgtgagccactgtgcccggccgcctgagacattttgggcaacagctgtgacagaagaaatgtgtatcccttccgggcaggggatttaagaagtggctcatggctgattatgttttctttgctctgtttctggaactgtgggaggatcttctgggatatgggtctatctgtttgagtctctgaatgactacgaccaccagagcccccttgttgacccgtgatggatgtgaaatcaattcagaagtcaaggccgggtgcggtggctcacgcctgtaatctcagcacttagggagtctgaggcgggcagatcatgaggtcaggtaatcgagaccatcctgactaacatggtgaaaccccaactctactaaaaatataaaaaaatagccaggcatggtgtcaggcgcctgtagtcccagctactcaggaggctgaggtaggagaatctcttgaactcaggaggtggaggttacagtgagctgagactgcaccactgcactccagcctgggcgacagagtgagactccatccaccacaccccaccccctgcaaaaaaaaaaaggaaagaagtcaactttgctgttgaagccactgaggttagggggcttgtttgttacacagcgtcacctgtcctgaccaatgcatgactcatttcatccttagcagagcccctgagagaagggcctttatcttcatttcacaaatgaagagtcaatctcagagaggttagcagcttgagcaagctcacacagtgagaggtggagcttggatttgaatccaggtctgtctaacctcaaagactgaagtggggatgaaaataagttgtcattgttgtttgcctgtcactcaggtgatgtaactcttgtctaggctttgcctatggagactttgtgatatatctctgcactgatcacccaggtgatgggactcttgtctaggctcttctatccttggattgtaaccttgcaggatcttgaactcaaatcctttcagggatcgtagaagtgaacacatcaaagctgccatgataaagttgtagaaaagtgggcaatattgccaaatgcaaaatatctgggatatattttggtctgagatcaccatttgagattcctggaagttagggaatatggaggccaactcctgtagggatgttgtataagactccaagccctaagtcaatgatctcaaccctgtggatcagcactctccatgtaatgggacattttaacccattttctgctgctataacagaatatcatagactagggaatctataaagaaaataaatttatttcttagagttctggaggctaggaagtccaaggatgagggggtctgcatctggtgagagccttcttgctgtgtcatctcatggctgaaggcagcagagcaagactttcagaaagaaagagagtaaaaggggctgaacttgcttttaatacaagcacactcccaagataactaacccaccccccagataactaaacttttcctgagatagtgacattaatccatgcatgggggcagaatctcataacccaatcactcttattaggccccacctctcaacactatcacatagaggattaagtttccaacacttgagctcggggggacacatgaagaccatacatgggggattgatgagtatatgggagggaccagccatgaatattttggctgagagttgtgtttgggagctgaagccatgctccatcatagcagggcacacatagacctttgaatgctctgaggaatgaatattgaacagtgtaaatcatggcagaaggtggaatatttaaaaggcagaactgcctgggtcaactaaaagagtgaacaaacagcctgtagcctgtggctggctcctcttctcttcccatccccacctttcacctttctctctttctttctttctctccctccctctctctctcccttccttccctccttctttccttcctttcttccttcctctaccttcttctttctctccctccctgcttccttgtttctttccttctatttccctctttctctccctccttccttccttctctctctcatttccttctctctttctttctctctctctccatctttctctccctccatctttccttctctcattctttccttccatctctctttccttctttgtccccttccttccttcctttcttcatccctccttcctgccttcctttcttctctcttcctttgactgatgtgttctgagctcaagcaccctgtggggtactaagtggtaccaaaattgactcaagaatcaagaagaaatagaaaactaagaagtactataacatgaagaacataaaatctctagtaaaataaaatctttcacaaaggaaggactaggcccagatggttgtatgagcaaattttacagactttcaaagaatggatcattctaattatgttcctaacaactgcagctaggaatattaatgcttgatttttcaagagcttcatttcctaaaatctgtaggttcaaaggtagattggtctgtgttggaaatcctcaaatgttgtgcagttccttgaagttttagcagtaaaaaagaaacgtgttgcctgcattaactttgaattttgtaactgttaccagttaatagagatactctatgcatttatatacactctaattttataggaatggaggcatatcagacacatggttctgcacccaggttttttcctttgtaacatatcttggacatcatttttgagcatccttttaaaatttatattttttaaatagctgtgtagtagtctatcatatgaataaccataatttcaataaacagtaaggtgttaatcattaatgtgattgataaacattaaagtgatttctagacttttgttaattaaaaaggtggtataatactttctcccattcatacataattccaggcatcatgagtatgtctgtagggtaaatttctggaaatgaaattgctgaatcagagagtatttccatttataattttggtatatattgtttaatcacaattgatatagtttctactaatttataatcccagtaacaagatgtgagtaccacttcaaactccacatcactggcagtgcttgaagtcatgatgcatattgccagtctcccttcaagtaaagttctattagctttacaaaaattttataaatgccagacgttacatttccagatagctttgtggtaaccaaaaaataattgatttattagcaatttgtatatcacattgagacaaaatatatttgtgataaatatcattattgttatgtatttaaaacatctcatgtattaagaaatcatactttagatggggccaaactggccgattagaagcaactgtgtctcatggctctcacagagagcaatgagaactgtgagtgaattctgcaccttcaattgaggtattcaggttcttgcattggaactgactaggcagacagctcgacccacagagagtcaggaaaaacaagtgggtcaatgacccacacaggtgtggctagccgagcccccacttgcaggcaagggaggccatgagtgattgttcgactctgcccgggaaaccatgcttctcccatggatctttgcaacctgcagatgaggaggtcacctcatgagctcagccaccacggccttgggtctgaagcacagagctgtgtggagtctcagcggagtgctcgctggcttactggggcatgcatggaaacccaggaattttgcatactctgccccgagaattccagcaaagcgagagatacatctgtgcattcccctaggaagggggctgaatccagggagccaagtgacatcattctgaggccccactcccacagcacctcacaagacccattggcttggaattccagctggccagtggcagcaggctggagatagccggaggtggaccgagttctcagggggaggggcagcggctctatctgtggtttgagttggccgctctagcctgctggcaccagggaccaggaggagtcccctataacacagtacagctgttgtgactgatcgtggccaggctgcttctttaagtgagaccaaaatccatccatcctcactggacagggcctccccatcagaattttagaaactccagctggagttctatggacagaactctgatttctccctgggatgaagtccccagagagaagggtagctgctgtctccccagttcagccaactgaacctttccagcctgctggctctgcagattcctgggggtcagaacaacacacctgctctgccaaagggcagccagactgcttctttaagcagtccctgatcctgttcctcctgactgggtgagacctcccaacaggggtcaccagacacctcctacaggagcgttccagctggcatcaagtcagtacccccttggactggtgctcccagaggaaggatcaggttgccatctttgctgttttgcagccttcactggtgatacctccaggtgcaggagagactgaggtgactagggtccagagtggatgctcaaaaaccacagcagccctagccctagggaagagtggtctgactgttaaaaacaaacagaaagcaacaacaacatcaacaaaaaacccataaaaactccgttcaaaagtcaacaacgtcaaagatcaaaggtagataagcccacaaagatgagaaagcatcaacacaaaaacgcagaaaactcaaaaaggcagaaagcctcttctcctctaaatgacaacaacacctccccagcaagggcacagaactgacccaaggctgagatggctgaattgacaaaagtaggctttaggaggtgggtaataacaaacttctctgagctgaaggagcacgttctaacttaatgcaagaagctaaaaatcataaaagaacacagtagctgataaccagaatattcagtttagagagaaacataactgacatgatggatctgaaaaacacaacatgagaacttcacaacgcaaccacaactatcactcacagaataggccaagtggaggaaagaatctcagagcttcaaaactgtctatctgatataagacaggaagagaagaatagagaaagaagaataaaaaagaaagaacaacaaaaccttcaaaaaaaaatgggattatgtaaaaagactgaacttaagactgataagggtaccttggcccactatgatcaagatggcttcatccctgggatacaaggttggttcaacacaggcaaatctataaatgtagttcatcacaaaaacagaattaaacacaaaaacaacacgattatctcaatagatgcagaaaaggccttcaataaaattcaacatcccttcatgttaaaaactctcaataaactaggtattgaaagatcacacctcaaaataataagagccatatatgataaacccacagccaatatcatactgaatgagcaaaagctggaagcattccccttgaaaactggcacaagaaaaggatggcctctctcaccactcttattcaacgtagtactggaatttctggccagggcaatcaggcaggaaaaataaataacagtatttaaataggaagagatgaagtcaaattatctttgtttgcagatgacatgatcctgtatctagaaaaccccatcatctcagcccaagagcttcttaagctgataaaccacatcaacagaatctcaggatacaaaatcagtgtgcaaaaattgctagtattcctatacacaaacaacaggcaagtagagagcgaaatcgggaatgaacttcattcacaattgctactaagagaatgaaatacataggaatacagctaacaagagaagtgaagaacctcttcgaggaggactacaaaccactgctcagagaaatcagataggacacaaacaaatggagaagcactccatgctcatggatagggaagaattcattcctgaaaatgtccatactgcccaaagtaatttataaaggaattcaatactattcccattaaactaccaatgacattcttcacagaattagaagaaactattttaaaattctcatgaaccagaaatgagcccaaatagccaaggcaattctaagcaaaaagaacaaagctggaggtatcacactacccaacttcaaactacactataatgctacagtaaccaaaacagcatggtactggtacaaaaactaccaatgaaacagaatacagaactctgaaataagaccatacacatacaaccatctgatctttgacaaacctgacaaacacaagcaatggggaagggattctttatttaataaatcatgttgggaaaactggctagccatatgcagaaactgaaactggacatcttccttataccttatacaaaaaataactcaagatggaataaagacttaaacataagacctaaaaccataaaaaccatagaagaaaacctaggcaataccattcaggacataggcatgggcaaagactttgtgactaaaacaccaaaagcaatggcaacaaaagcccaaattgacaaatgggatctaattaaagtaaagagcttttgcacagcaaaataaactatcatcagagtgaacagacaacctacagattgggataaaatttttgcaatctatctgtctgacaaagggctaatatccagaatatacaaagaacttaaacaaatttacaagaaaaaaacagccccatcaaaaagtgggcaaaggaaacgagcagacacttctcaaaagaagatatttacgcggccaccaaacatatgaaaaaaagctcatcacgactggtcattagatgaacacaaatcaaaaccacaatgagataccatctcattccagttagaatggcgattattaaaaagtcaggaaacagcagatgctgatgagactgtggagaaacaggaatgctttaacactgttggtaggagtgtaaattagttcagtcattgtggaagacagtgtgaaaattcctcaaagatatagaaccagaaataccatttgacccagcaatcccattatagggtatatacccaaagcattataaattattatactataaatacacatgaactgtatgtttatttcagcactgtatgtttatttcagcactgttcacaatagcaaagacttggaaccaacccaaatgcccattaatgataaactggataaagaaaatgtggcatatatacaccacggaatactatgcatttatgtcctttccagggacagggctgaagctggaaaccatcattctcagcaaactaacacaagaaaagaaaaccaggccaggagcagtgactcatgcctgtagtctcagaaatttgggaggctgaggtggggagtttgagatcagcctgaccaacatggagaaaccccatctctactaaaaatacaaacaattagccaggcatattggcacatacttgtaatcctagctacttgggaggctgaggcaggagaatcgcttgaacccaggaggcagaggttgtggtgagccgagatcacgccattgcactccaacctgggcaacaagagtgaaaatttgtctcaaaaaaaaaaaaaaagagagagagagaaagaaaaagagaaaagaaaaccaaacactgcatgttctcactcataagtgggagttgaacaatgaggacacatggacacagggaggggaacatcacacactggggcctgtcatggggtgggagactaggggaggaatagcgttaggagaaatacctatgtagatgacgggttgatgggtgcagcaaaccaccatggcacatgtataactatgtaacaaacctgcatgctctgcccatgtatcatagaacttaaagtacaacaaagaaaactttacataaatgcataaagtctagaacagctaatatattataatgaaatgtcaactatactcccagctgaaagagaacagcataaaattatgaagagctctccacaaatctctaaatttatgtcctcataagattatatttctatttcttcttgaataatttcctgattttagttatgacttagtgatagtaagatggtaattatgaggagaaaattctcccaacactccatagagaaaattctgcctcatttcaccacacacctgagtcttaagtagtcacttctaatgtagctgaataatagatcctcacccagctgagtctatgagttgaatccatgtatgtgagataaggcccccaaggagaggtaataagctgggaatgccatcagctcatctttcttcaggcctatatttgtcattgtcacttgtagaagcaggacagccctggcattgggattggtagtaacagagagtatcaaagggaaaactgaacttccctaatttttggaaaacagcagattggaaagagatgggctccaatgttttccatgtgtgaggtcattgtcccaggtagccttgctcaggacatttcttgtcagcaaaatagaagtcaaacgatatttctatcttccaagagaatagaacataatgtcagattttctcatggattcccacaagttcaagaaactatcatggccttatttaactgcttaagcagttcaactaaaaaattattagtctttcaaatacacaggaatctgtttggaaaaatgttaaccagaaaaagttggaattctaaagtaaaaaatgcataaggccataacaattttttatatcttttaatctatatgtcaactggggaaaaaaaaaacattctctgaagtttccttttatatcattaaagacttattctttactaccagcaatacagggcgacttattcaggttgaatattgaaggtaaactttaacttaattttaagttttggctaatttttaagcatttctcagtcacctgccatgatttcatctcagaaaccaaaatctcaatttcatttagacctttgaaatattaaaatagaaggttaaatgcttcaaaataatattcatgtagagacttacatatgtggaccaggaatctccatgtattacaaagtttatgagaacataacaaatgttgatatgcacatttaattctgaaataaaaacttacaacaaataaaactaacaaatcaggaaaatattgtaggttacatattttatgtctaaaaatataggtatgaaacactcaagaatggataaaggaagaaatcacaagagaaaagaaaaaatatctagagacaaattaaaaacatgaaataccaaaagttaagagatacatcaaaaacggtaccataagggaaaaatttatagctataaatgattataaaaaataagatactgaatcaacaactttactcctaaggaactaaaaacagagagaaaaagagggactattaaagagggacaactaaaagctagcaaaattaaaaaaaaagataaagatagcagtggaaataagtgaaatagagaatagaaaaacaatatcaaaaatcaacacaacctagtttcttctctgaaaaagatcaaaactgacaaaattttatctagattaactaagaaagaaagggaatattcaaattactaaactcaaaaataaaatgggtacattactaacaaatttttggagtaaaaaaggggtgtaggagagtaccataagggactatatactaaaaaattgaatagcctaaataaaatgaacaaattcctagaaacaaaaaacctactaagactgaaacagaaaagttgaataaacctattcagcaaggagattcagcaggaagattgcatcagtaatcaaaaacccagcaacaaagaaaagcctggaccagatggtttcactgttgaattctacccaatgtttaaagcagaattaacaccgcttcttctcaaactttttcaaaacgttgaagaggaggtagttttttctaacttattctatgaggccagtattaccctgacaccaagccagacaaaggcaccataagaaaactacaaacatcccttatacatgctgatgcaaaaatcctcaacaaaataccagcaactcaaacttagcagtacattaaaaggattatagactatgaatgagtataattgactcctgaaatgaaagtatgttacagcacatgaaaatcagcataatatcacattaacataaggaaaaaaccctcatgtaatcatcttaagcaaagaagaaaaagcatttgtcaaaatttaatgcagattcatgacaaaatatacttaataaactataaaaagaaagaaaacaccttaacataatgttatacaaaaaacaaaacaaaacaaaaaaaacacagctaacatggtgaaagactgaaagcttttaccctaagagcaaaaacaaggatgcatgcttttactactgctatttagtataatactgaaggttctagttagttaaaacaacaaggtgagtaaaagaattaaagatattccaattttttaaaaataaaattatctgtttgcagatgacataaacttatatattaaaaatcttttagtttctgtgaaataaactgtcagatgcaataaataaaattcagcaaagctgaaggatacaaaataatacacaaaaatcagttgtatttctacaataacaataaactgtctgaagaagaaatcaagacaacggtatcatgtatgatagcatcaaaagaataaaatccttagaaacccacttaaccaaggaaatgaaaaacctgtacagcaaaaactagaaacatggcatgaaagtattaaagatgacacaaataaatgaaaagacatcatgtgtttatggactggaagacaaaatcttgtcaaggtgccattgttatctatagtcatctacagattcaataaaatcactgcaaacattccaatatttgcaaaaatagaaaaacctgttctaaaattcagatgaaatctcaaaaaaccccaagcagccaaatcaatcttaaaatctaacaaagttagaggactaacacctcctggtttcaaacttcagtatgcaaaacaatgctgtaccagcatagagacagacacaaagaccaatgcaatagaaataaagaaccaaaaaatatggtcatgatttttaacaagggcgtcaacactgttcaatggggaaaggacagtatttttttaaatggtgttaaaaacggatatttacatctatctatctatatatttatatgtatatatatgtatatatatttatatgtatatatatatttatatgtatatatttttatatgtatatatatatttatatgtatatatatatttatatgtatatatttttatatgtatatatatatatatttatatgtgtatatatatatatcccaaattagctttttgtctgtcaggtatgttgcagatctatttccccagtctgttgactttgactttgagacatttttctctcatacaaaattttaatttttatggagtcaaatacaacctcggcgacgatctggttccctcactgcccggcctgcgtgagcacgatttccctcatggccaaggcgggattacagcggcaggagaaacgcgagaaggagtagcagacgcgcagctacccagcccacactccaccaacgctgaaatagcccggcgcccacctccctcagcctcggattcggctccaagaataagtaacagctttacttccacacaggtgtacccacctgtgaatcccttggcgttgaacgtctgttggagagctcacgtgtccttgctgtggtcctttccatgttggggaaagctggtcagctggagaacttcctcccacatctttagtaagactaaatccctagctgagctgaaactgaattttcctcccatgtgggaggggaagactcttgtatccatattcacagagtgtcttcgcacttgtcctagattgatgacatatttttgtaattgatgagtcttttcatctattaggagatctgtgcttaggaaaggtcttccgaatgttaactcaacaggatttaattataagttttactttggagcagttcaaacccgcagtaagctatgggtgttagagatagtcaggcgtctgatttagctagagtcttctttagagtaggattagccctttcacctttccagaggactgcggtctgcatacagagtgaaggtaatattggattcttaaagctgaggataagtgttgggatacacctgctgtgaaagacgggccattgccactttgcaggcttttggattacccaaactgaggagttatttcttctggtaaacatttttcagatggggtggggaatgcctcgatctaaccaatgaaggtatcaataagaattagcaaatatttgaatctcctgcagaaaggtatctgagtaaattagagttgccagttctcacctggataggttcctcaactttggacagttttacctggagaaggagaaaattgctagccttttgggtcatgtcaggcacagagctcacagggctgagtcacctgttttggtgtattgaaaagatttacccctataaacaaatgagacattaacggaaaccaagaatcccttctagggtgaaaagaatcatgaaagtgctgaattatattcctatggttggtatttggcattagtaatttattactatcattcagccagccagagggaccctggactgaaatgcaatccctggcccatttttgttcttcttcagagtgttctgactcagttcaatgtatgctgaccagcacacccataagcttcattggccttttcagtgcaggggccttggctgcgacatctgcaaggacatttccttctacatggtcagtctctcttttgaagtcatctgcaattaattatactcactttttggcagcaaagcagcattcaaacaagctcaaaatctgaatgatgttgtatggaaaagcccttgggggtcaggagtccctacccattccaaattgcagcataagtatgaagcactaaaaaatcatacttggaatcagtgtaaatgttaacttttaaatcctttcccaactgcaggggctgagtaagttcaattaactcagctttttgtgctgaggtagaggccagcaagacttatgccttgattctcttgtgctgactactaatagcatatctaccactcctgttttcctgatgtataaaacaacatacatctgttaaccactcttccttgggatggtcaaggggctcatctctcttaagtctggcccgctagaataaatgtgtttcataacctgtgacaggctttggctgtgtcccagtcaaatcttatcttgaattgtagctcacataattcctatatatcgtgggagggatccagtgggaggtaatcgaatcgggggatgggtctttcccatgctgtcttcgtgacagtgaataagtctcatgagatctgatggtttatttatttatttatttatttatttttgagacatagtcttgctctgttgctcaagctggagtgcattatcaggaccttggctcactgcaactttgactcctgggttcaagcgattctcctgtctcagcctcccgagtagctgggattataggtgcctaccaccagcctgtctaatttttgtacttttagtatagacggggattcaccatgttggccaggctggtcatccactgccttggcctcccaaagtgctgggattacagctgatggttttataaaggggagtttccctacacaagcccttttgcctgctaccatgtaagagatgtgactttgctcctcatttgccttctgccatgagcgtgaggcctctgaccatgtggaactgtgagtcaatgaaacttcttttctttgtaaattatccagcctcagatatgtctttattagcagcatgaaaacagactaatacaatctgtatgccaggaaggctagaagcacctggagactctggcccataagttgctgggtttatggtttggcagcctttaaaggttatgtcggctatcccagaacccttcagagatgactgtccaggttagttttgaggctgaatggatatctgggtcagtccattcaaaggcaaacatattatgaatctggatgcattgagatccagaaaagtgcatctttcagatttaggaatgtaaaccagcttacattccctgggacttggtaagtattggggacaatgagttgtatggagacaactgcattcttaatgctctaagcgttctgacaaatctgtacttgccattaggctttttatctggtaacatgcgagtattgtaaggagactctcatggccttaataactcatatggcaagaatttggcaataaggcattgaatttcccctcatgcttctcaccttaaaatgtattgtctcttctgagggcgaggagcactaggctgaagttggatttgaatgggggaggtgtttagtgtgtttcccagagtctgtgttgcccaaacctcaagatttacttgagacaacacctcaggtgataaatgtgacagctcattcttaacttcttttttcccctgaggggtcaggaacaaaagtaacactttctatgctttatgatctgtgaaggtgaccatgacttggtctcctgagtcaacaaacctctccccagtaagaggtcaggcaatcagacaatactaaaaaggcaggcgagaaacctagaggctctggaggacaacttagaagataggaaaagcagtgattttgggcttgtccatcatgagaatacaggagcccattgtattgaatcagtacagagtaatctgctcccatacctaatatgaagttaatactcctacctgctacttcaagagtcacctgaggctcctccacctctcgatagctaatagtccaatgggagcggaggtaggaagtatcaggccctcccagttttgagtctgctgggctctgatgatggctcccttggaagcacggtgcatttccttcggcagtggccgaccttcctacagaaggcacattgatttatatccaaggcacagtggcccagaggcacagactgagacttttaccttctcacttcctctgtgagagccaggggttaaggggctgcctctgaagtggtggagagcacaaggctgcagctagaagctgggtctcttggaagatttgctttattttatatttgcttggccctattcctgtgatggaaagctgcaaaatccaagtctaaaatctgatccatggagtctggcagcctaaggctgcttttggtggctttctatagatatcagaagcagatcagtctataaaataaactcctagcaatgcttgtcccttcttggagtcagggtcagtgttagtgtatctcctcaaggtctaaattatccacccttgtaataaggctaggttttcatcttttccctgagtaattttccagactttataaaaattaaaaagctttatcacacttttttttattccttcaaggagtcaaatgatcataattttttctctctatatcccactttcttcctaattcatttgtcttttctagattctagttcttttgggtcctagtcaggcactgctatgcctcctatttgataggtgtcttgtccctggttgcaggctgccaccctattagcatgtgctctagtcacttccataatgcactgtgtttctaccatgcagcaggtaaacataaatatatgcaaatcttgcctggtcagatcatacatcaaggttagcctcttaaatttttctatgaattttcccggaacttctgaaaagtgttttagtttttccctgcatatggctaattcagatgtagaaaagggtacatatacctatatagcgtggggaaaagaaagagggatcagactgttactttgtctatgtagaaagaagtagacataagacattccattttattctgtactaagaaaaattcttctgccttgagatactgttaatctgtaaccctacccccaaccctgtgttcacagaaacatgtgctgtgtcgactcaaggtttaatggatttagggatatgcaggatgtgctttgttaaacaaatgcttgaagacagcatgattgttaaaagtcatcaccactccctactgtcaagtacccagggacacaaaacagtgcggaaggccaaagggacctctgcctaggaaagccagggattgtccaaggtttctccgcatgtgatattctgaaatatggcctcgtgggaagggaaggacctgaccatcccccagcccgacacctgtaaatggtctgtgctgaggaggattaataaaagaggaaggcctctttgcagttgatataagacaaacccatctgtctcctgctcgtccctgggcaatggaatgtctcagtgtaaaacccgattgtatattccatctactgagataagagaaaactgccttagggctggaggtgagacatgctggaggcaatactgctctttaaggcattgagatgtttatgtatatgcacatcaaaaggacagcacttttttctttaccttgtttacgatgcagaggcacttgctcacatgttttcctgctgacactctctccactattaccctattgtcctgccacgtccctctctccgagaaatgccccataatgatcaataagtactaaggaaactcagagactggtgccgccgcgggtcctccatatggtaagcgccgatgccctgggcccactttttctctatactttgtctctgagactcttcacaagtctcttgttccacctgaggagaaacgcccacaggtgtggagggacaggccaccccttcaatatagtgtccctattatcatctgtcacttcccagagagggcaaacattcagctttgctagctgataagaggccccactgcatgttgttctggtgaagttcgggtgtttcgagagtggggtgtgtacgtaagacaggactcaaagggcagggagaagatgatgactggacactagataaccctggaaaactagaagaaattaataacatgttgcacacctcaccagaactggaaggagtctcattgtgttcttatggggtgcttggactggcagggggagttcagccccagctaagaaaagcctaatattaagaggtacttgcattaaaagggtaatcaattacgtgttgtccctattttgtcttttcctccatcaaacatatagaagcccattttaattttttatcctgaccaagcatcagagaagcctgtatataatgtatttcctccctcttagtttctcttctatgaaacaaattaagctgcaaaataggaatcagatcaaacaggggaaatgggaaggctgtagcttgtatattgtaatgtattagtccactttcacactgctatggcaaaactgacaaaactctctcagaaaaaaaatgacatgctgggtttagaaagtagggtccagctgccctataccagctcatcaaagatgcatttatggttaagaaatgagagaaaactgttaagaaaaaccctcatgttctccatcttgagggtaattgtttgcagagggttgtcatagaagaggctgccactaaacaggcatatctgatcttatcatgtagagctcttaaataccacatttcaacttctagtcataatgatggcaaggttactgctgatctttcctgattgttaaggtaaaaaaatactaggttccaagacaattctttttttcagtgtcacttggaccagtggcaaattaaacaaacagtcagttaagagtcagaggatcgcagaggaaagtaaaagctaaactctttggggcctctgtcctggggcagcctccaggctactacaaaacagaggtggtgagcagaaaggtgacaatatgtagagcactcaggtgagggacagagagcacaaggtggacagtccaaaaagagaaagtggcaaatatcttgtttagccaaatccattcttctcaatattcccagggcctctaaccctgtgggcttggcctctaatttgagtatgataatagtggataatcattcttgctcaccagaatggcttcacgactctaaaagacagcccacttgccaggtgtcagctgattgattctgtgtggattgttttccttggagtgagggtcttgtcttggtgtccgttcatggtgttgctgaaagatgttgctggaaaagagggtcctgatacagaccacaaagtaggattcttagatcttgtgcagtaaaaaatttgaggtgagtcagagagcacagtgaaagaagcaagtttattagaaattactccattacagagttggacatcctcagaaaacaagaggaggaatgcattgtcttttgttagtgtctctacttataaataactataaagagaaagagttataattaaatttggaaggtgcagatgtagtcactaaagtcggggctattgtttttaacaataaccattaacctattgacctaagctacttcattaataatatccttacaaaaaatgctgcactcctaggacatttatacatttttcaggcttggtggaagatgtcttgtatgaccacaaatattctgcaattgtaattggtgaccaggtaaaaaatgtgactattttcagaccatgaacattaaccttctagatgccttgtgaatacctagctactcatattaagatagaatattctagtcaagtttattaaactagaaactaggtaaccttgagttcctctaacagagcaagtctactcctcaaggagaaaatgtatttctcaggaattttgtgcattttgtttgatggcatttggtatgttttccaaaatggcagaaaagagtgaaattagtcctcaaagatttctcaagattagatataaaataaacaaaatgattatagttaatatgcaggttggtacagttgatattcaaaagaaattttgtttgaaacaaaatgagatttttatttttacttattttttgttattattattattattattaatcattttgaggcagactcttgctctgttgcccaggctggagtgcagtgcaccaacttggctcactgaaacttgcgcctcccgggttcaagcaattctcctgcctcagcctcccaagtagctgggattacaggcatgaatcaccacacccagctaatatttgtatctttagtagagatggggtttcactctgttggccaggctggtctcaaacccctgacaacaagcgatctgcccaccttggcctcccaaattgctaggattacaggcatgagccaccactcccagccacaatgaggtttttcaataattctgatttcctgctgttgagcagggagctgagcaaattcaacagatcatgggcctgaactaggggaagactgaggacaaagtctagaacacatgtgattaaattaattacaatggaaaccaaatcaaattgaataatgctctacctcttagtttcaagatgtttcccctcattttgaaatgtggtgttattccatggaaaagaaaactaatgttcatctccagagtaaagaatagggttctttgcagggattgattgactgagaactatggctcaggattaaaaatccttcttttttccatttatagaataaaaaaaaaatttctaaacccctgttgactaaatggacctctcttcttggataagcaaattccaaagttaacctgaaaagctagttcaagccatggttcacacatgcctcattatactctcctccctttggttttaattttaatttaaatttcaatttttaatttatttttgtgggtacatagttgttgtatatatttatgggggtacataacatactttgatgcagtcatgcaatgagtaatacataataaaaaacggggtatctgtcccctcaagcatttatagcttgtgttataaacaatccaattatactcttttagtttttttacatgtggaattaaattatttttgactataatcaccctgttatgctttcaaatgctgtcttattcattctttctaacaattgtttttttttacccatttagcatcccactatccccttgtttcctccctgcccttcccagcctctggtaaccatccttatactctctatctctatgacaccaattgttttgaattttagcacccacaaataagtgagaacatgggacatttgtctttctgtgcctgacatttcactttcataaacataaagactttcacaaacataaagactttcagttccatttatgttattgcaaatggcaggctctcattctttcttacagctgaatagtactccattgtgtatatgtaccacattttctctatccagtcatctgttgatggacatttaggttcctcccaaatcttggctattataaaccctgctgtggcaaacatgagagtgccaataggtctttgatttaccaattttatttcttgtaggcatatactgtgcagtgggattgctggaccacatagtagctctatttttagttatatcaggaacatccaaactgtccttaaatgtgctcccaacagcagtgtacgagggttcccttcactccacatactcaccagcatttgtttttcactgacttctggataaaagccaccttaactggggtgaaatgatatctcattttgggtttgattttcatttctatgatgatcagtaatgtggagcacctattcatttgcctgtttcacatttgtatgtcttctcttcataaatgtctatttaaattttttgtccactctgtatttattacttttttgtatagaatttcttgaactcaatatattgtagtgtattagtctgtttctgcactgctataaaaaaaacctgagactgtgttatccatttatttactgagatgaagtcttggtctcttgcccaggctgaagagcagtggtgtaatctcggctcactgcaacctccacctcctgattcaagcaattctctgcctcagcctcctgagtagctgagattacaggcacctgccaccatgcctggctaatttttgtatttttagtagagacggggtttcaccatcttgaccaggctggtcttgaactcctgacctcgtgatccacccaactcaacctcccaaagtggggagattacaggcatgagccaccgtacctggcaagactgggtaatttataaaggaaatgggtttaattgactcacagttccacatggccggggaggcttcaggaaacttacaataatggcagacggggaaacaggcacctcttacatgacagcaggcgagagagcatgtatgtgaagcaaagggggaagagtcccttataaaaccatcagatctcatgagaaatccctcattatcagaagaacagcatgggggaaaccacccccatgatccaatcaccttctaacaagtctctccctcaacatctggggattacaattcaatatgagatttgggtggggacacaaatcctaaccatatcatgtaactattaactgcttttcagatggataatttacaaatattttctctcattctgtggattttctcttcactttgtttcttgtttccttcactttaaaaaggctttctgactttctgtaatcccatttgtccatgtttgttttggttgtctgtgcttctagggcattatttgaggaatttttgcccaaaccaatgccctaaagagtttccccaatgttttcttgtaaaagtttgatggtttgaggcgttaggtttaagtctttaattcattttaatttgatttttgtaagtggcaagaaatagggttctagttgtattcttctgcctatggcttgccagttttcccagccctattcattacaaaaactgtctcattttttattgtgtgttcttgatacttctgttgaaaattaatttagctgttcctcccataggattccagaacactgctaagagggtctgaatgtttgtccctcacataggattccagaacactgctgctgggttctaaatgtttgtcacataggattccagaacactgctacaagggtctgaatgtttgttcctcacaggggattccagaacactcctgctgttgtctgaatgtttgtccctcacataggattcctgaacactgttatgagggtctgaatgtttgtccctcacacagaatgccagttttcccagccctatttattataaaaactgtcttattttttattgtatattcttggcacttttgttgaaaattaattcagctgtatgagtttgtttctaaagtctctatttcgttccatctgtctttatgtctgtttttatgctagtgtcatgctgttttaattattataacttagtagtataatttaaaaacaggtaatggaattcctccagttttgttttatatactcagcatagctttgactattatgctgttttgtgatgtttccatataaatttcagaattttttttctatatctgtgaggaatgtcttcttcttcttcttcttttttttttagattgcatcttgctctatcacctagactggagtgcagtgatgttacacctgcacaccacaacctccacctcctgggttcaagcaattctttgcctcagcctcctgagtagctgggattacaggcacccgccaccatgcctggctaatttttttgtatttttagtagaggtggggtttcaccaagttggccaagctggtcttgaactcctgacctcgtgatccaccaacttcagcctcccaaagtgctgggattacagacgtgagccactgcccctagcctgttattttgatagagatggcatgaaatgtatagattgttatggattgtatggacattttttaaaaatacagattcttccaatctgtgaacataaaaatatctttccaatttttgggtcctttttcatttcttttatcagtgttttacagttttaactgttgagaacttttatttctttggtaaattcccacacattttgttttatttgtggctactgcaaatagtattacatttttgaattctttttcagtttgttgactgttggcatatagaaatcctactgatttgtatatgttgattttgaattctgcaaatttactcaagttattacttctaatagtttttggtggatgtattaggccattgtcatattgctataaaaagtaatcagtgactggttaatttataaagaaaataggtttaattggttcatggttcttcaggctgtacagaaagcatagcactggcttctgcttctggggaagcctctgaaaactgacaaggtgaaaaataaatccggtgcttgcacatcacatggtaagtgcgagggcaaggggaaagtgctacacacacttatagataaccagctctgataaaaacttactattgtgggaatggcaccgaagtaaatgatgccaaactgttcatggaaatcttgccctcatgattcaatcacctcccctataggcccacatccaacattgaggattatatttcaatataagattttggtgggaatacacatccaaactgtatcattttgcccctggccattccaaatctcatatccttctcatatttcaaaatacaatcatgacttcccaataatccccaaagtcttaactaatttcagccttaactcaaaagtcaaaagtctcatctaagacaaagctaatttcttccttctataagcctgtaaaataaaaaaaaaacaaaaaacaagttaggttcttccaagacataaatgaggcagaggcattgggtaaatattcctattctaaaaggaagaaatcagccaaaagaaaggggccacaggacccatgaaagtctgaaacccagaagggcagttattcaattgtaaggctccaaaataattatttttgactctgtgtcccatttccagggcacactaatgccttgggaaggttctaccttgtgactttgcatggttcagcccccacagctgctctcatgggctggcattctgtgcctctggcttttcaaggtgcaaggtgcaggctgtagctagatctaccattctggggtctggaggacagtgatcccctcctcatagatatactaggccatgacccagtggggatcctgcctggggactgtcaccccacatttcttttctccattgttttagtacaggatctccatgagggctccacccctgcagcatgcttctgcctgcacaccctggctttttcatacatcctttgaaataaaggtggaggctcccaagtctcaactacttgcatttggtaaacccacaggcctaacaccacatgaaagctaccaagattatggcttgcacactctgaagcagtgactggagttgtaactggatcaatttgagctacacctagagctgaagcagtggccaggatgcagggagccttgttccaaagctacccaaggcagcaggtcctagtctgatcccagaaactattctcttcttttaggcctcagggcctgtgatggggggctgccttttagatttttaaaatgccttcaattcctctttcccattgccttggctatcaacacttgcttttttttaggttatacaaatatctctaacaagtagttgacccatatcctgcttgagttcctctcttataaaagctttttatatttcagccacctgactaggctgcaaagttttcaagcttttacactatgcttcttttgtaagtataagttactacttattttatttttattcttttgctagaatatgtgagcataggttgttagaagcagccaggccacatcacaactgctttgctgtttagacatttttccaacagaaaccctaaatcatcaatttcgaattcaaacttttatatatccctagggcatgacagaaattcagccaaccactttgctaagacaacatgcatgacctttgtttcagtcccaataagtttctagttttcatctgagacctcctcagcccgggcttcactgtccagatcactatcagcattttggtcacagacattcaaccagtctctaagaaaatctcaactttccctcatttttctgtcttctgaatcctacaaactcttccaacttctgcctgtttatccaattacaaagctgattccacattttggggtattcttataaccattttccattccttggtgccaattttctgtattaagctatttttgcatcactatgagagtgggactggataatttattttttacaaagtaggtttaagaggcttatgattctacaggctgtagagaagacataccactggaatatgcttctggagaggtctctggaagtttacagtcatggcagaagttgaagcagaatcttgcacatcacagggcaaaaagcaggagcaaagaacagagcggcgagttgttacacagttttaaataaccagatcttatgggaactcactcactatcatgaggataacaacaaatgggatggtgctaagccatttatgagtaatccaccccaatggttaaatcacctttcaccaggcccatattcaacattgagaattacatttaaatatgaaatttgttaggggacacacattcaaaccctatcagaggagtctttatgctttttctaatataagattatataactggcaaaaaaaaaaaggtaatttgacttcttttccaattgggatgcgttttattgctttctcctgtctgattgctccagataggactttcagcattatgttgaataacagtggtaaaagtggacattcttgtcatcttccagattttagaggaaagacttttagattttccccacttagtgtgatactagctgtgggtctgtcatatatgacttttattatgttgaggtatattcattccatacccagttttcaaagggttttttattattaaagaatattaaattttatcaaaacttttttagcataattgaaatgattatctggattttgtccttgttttgttttgttttgttttttgagatgaagtctccctctgtcacccaggctggagggcaatggcatgatctcagctcaatgcaaactctgcctcccaggttcaagtgattctccttcttcagcctcctgagtagctggtatcgcaggtgcccacaccacgcctggctaatttttgtaattttagtagagacggggcttcgccctgttggccagactggttttaaactcctaacctcaggtgatctgcccacctcggcttaccaaattgctgggattacaggtgtgagccactgtgcctggccccttcattctctttatgtgatctatcacatcgattgatttgcatgttgaaccatccttgcatccctgggataaatcccacttggtaattatgaattacctactcatgtattgcttaattcagtttgttaggtgttttgcaaatttttccaccaatattctcagatatgggcctgtagttccctttttttaatgtgtctttgtctggttttgatatcagggtaatactagccttaaagaatgagtttggaaatgttctttccttctctagttttcagtctggtcctacagacttttttattaaggctttaattttgttaattgttattgatctgttcaggttttaggtttttttcctagttaaatcttggtaagttgtgtgtgtctaagaattaatttcctctaggttttctaatttgttggcatacaattgctgatattatttaccaatgatcctttgcttttctgaagcattatttgtaatgtctcctttttacctctgattttactaatttgcatcttttctgttttttagttagcctgtttaaatatttgtcaattgttttacttttgaaaaaatcaacattttctttcattaattctttacattattttcgtcattttaactttatctacttctgctctaatctttattatttcttttcttctaattttgggttaggtttggtcttttattctagttaattaagatgtattgttaggttatttatttgaagcttttctgttttttatgtaggcacttacagttataaattttccttttataatagtatatatttactatattccataagtttttctatgctatgtttccattatcatttgtttcaagaaatttttctattttcttcttaacatttttatcaacctactaatcattcaggagcatgttgcttaatgtccatgtgtttgcatagtttcttaaattccttttttaattgatttctagttttatcccctgtagtcagagaaaatgcttgatattacttcaattttttggaatgtttttagacttgttccttaacatatggtcaatccttgaaaataatgcatgtgctgaggagaagaatgtgtattctgcagctgttggatgaaattttctgtaaatatctattaggttcatttgttctatagtacagattgagtctgatgtttatttgtttgttttctgtctggaaggtctacccaatgactaaactggggtgttgatgcgtccagccattattgtattgaggtctctttctttagctcataatatttgcttcatttatctaggtgctttagtgttgggtgcatatatattttcaattattatatcctcttgatgaattgatctctttattattatataatgaccttttaatttcttcctacagtcttttgtggaaatctatttttgtctggtataagtatggctatttctgctttttttggtctctattggcatgggataactttttccatccttttattttcagtctaaatgtatctttgtaggtaaagtatgtttttttttgtgggtcacagattattgtcctgcttctctatccattcatccactatttttcttttgactggagtatttagttcatttaaattcaatgttatcagtgataagcacttactcctgccattttttaatttgttttctgattgatttttgtcctctcttccttttttcctttcttcctgtcttccttttagtgaaggtgatttctcttgaattataatctaatttcttgctttttactttttgtacatctttggtacaccttttgatttgaaattcccatgaggtttgaaaataatataatacatgattttagactgtggacaatttaacactggttgcataaacaaagaaacaagcaaaacagaggttggagccaagatggccaaatagcaacagctccagtctacagctcccagaatgagcgacacagaagatgggtgatttctgcatttccaaatgaggtaccgggttcatctcactgggaagtgtcagacagagtgtgcagcacagtgggtgcagtgcactgagcatgagcagaagcagggtaagacatcacctcacccaggaagcacaaggggtcagggaattccctttgctagtcaaagaaaggcgtgacagacggcacctggaaaattgggtcactcccaccccaatactgcacttttccaatggtcttaggaaacggcacaccaggagattatatctcacgcctggcttggaggttcctatgcccacagagcctcactcattgctagcacagcagtatgagatcaaactgcaaggtggcagtgaggcttggagagggtcccctgccattgctgaggcttgagtaggtaaagcagctgggaagcttgaactgggtggagcccacttcagctcaaggaggcctgtctgcctctgtagactccacctctggggctagggcatagccaaataaaaggcagcagaaacctctgcagacttaaatgtccctgtctgacagctttgaagagagtagtgattcttccagcatgcaactggagatctgagaatgggcagactgcctcctcaactgggtccctgaacccctagtagcctaactgggaggcaccccacagtagaggtggactgacacgtaacatggccgggtaatcctttgagacaaaacttccagaggaacgatcaagcagcagcatttgcagttcaccaatatccattgttctgcagccactgctgctgatacccaggtaaacagggtcaggagtggacctccagcaaactccaacagacctgcagctgagggttctgactgttagaaggaaaactaacaaacagaaaggacatccactccaaaaacccatctgtacgtcaccatcataaaagaccaaaggtagataaaaccacaaatatggggaaaaaacagagcagaaaaactggaaactctaaaaatcagagctcctctcctcctccaaaggaacgcagctcctcaccagcaacggaacaaagctagaaggagaatgactttgaggagttgagagaagaagccttcagatgattaaactatgctaagctaaaggagaaattttgaacccatggcaaagaagttaaaaaccttgaaaaaaagttagatgaatggctaagtagaataaccaatggagagaaatccttaaagggcctgatggagctgaaaaccatggcacaaaaactaagtgatgaatgccaaagcctcagtagccgattggatcaactggaagaaagggtatcagtgatggaagatgaaatgaatgaaatgaagcgagaagagaagttaagagaaaaagaaataaaaacaaatgaacaaagcctccaataaatatgggactatgtgaaaagaccaaatctaggtctgattggtgtacctgaaagtgacggggagaatggaaccaagttggaaagcactctgcaagacaatatccaggagaacttccccaatctaggaaggcaggccaacattcacattcaggagatacagagaatgccacaaagatactccttgagaagagcaacaccaggacacataattgtcagtttcaccaaagttgaaatgaggaaaaaatgttaatggcagccagagacaaaggtcaggttacccacaaagagaagcccatcagactaacagctgatctctcggcagaaactctacaagccagaagagagtgggggccaatattcattattcttaaagaaaagaattttcaaaccaaaatttcatatccagccaaactaaacttcataagtgaaggagaaataaaatcctttacagacaaacaaatgctgagagattttgtcaccaccagacctgccctaaaagagcttctgaaggaaacactaaatgtggaaaggaaaaactggtaccagacactgaaaaacgccaaattgtaaagaccatcaatgctaggaagaaactgcatcaactaatgagcaaaataaccagctaacatcataatgacaggatcaaattcacacataccaatattaaccttaaatgtaaatgcattcaatgctccaattaaaagacacagactggcaaattggataaagagtcaagacgaatcagtgtgctgtattcaggaaacctatctcatgtgcagagatacatacaggctcaaaataaagggatggaggaagatctaccaagcaaatggaaaacaaaaaaaggcaggggttgcaatcctagtcgctgataaaacagacatgaaaccaacaaagatcaaaagagacaaagaaggccatgacataatggtaaagggatcaattcaacaagaagagctaattatcctaaatacatatgcacccaatacaggagcacccagattcataaagcaagtccttagagacctacaaggagacttagactcccacacaataataatgggagactttaacaccccactgttaatattagacagatcaatgagaaagaaagttaacaaggatatgcaggaattgaactcagctctgcaccaagtggacctaatagacatctacagaactctccaccccaagtcaacagaatacacattcttttcagcaccacaccacacctattccaaaattgaccacatagttggaagtaaagctctcctcagcaaacgtaaaagaacagaagttataacaaactgtctctcagaccacagtgcaatcaaactagaactcaggattaagaaactcactcaaaaccactcaactacatggaaactgaacaacctgctcctgaatgactactgggtatataacgaaatgaaggcagaaataaagatgttctttgaaaccaatgagaacaaagacacaacacaccagaatttctgggacacattcaaagcagtgtgtacagggaaatttatagcactaaatgcccacaagagaaagcaggaaagatctaatatggacaccataacatcacaattaaaagaactagagaagcaagatcaaacacattcaaaaactagcagaaggcaagaagtaactaaaatcagagcagaactgaaggaaatagagacacagaaaacccttcaaaaagtcaatgaatccaggagcttgttttttgaaaagttcaataaaattgatagactgctagcaagactaataaagaagaaaagagagaagaatcaaatagatgcaataaaaaatgataaaggagatattaccaccgatcccacagaaatacaaactaccatcggtgaatacaataaacacctctatgcaaataaatcggaaaatctagaagaaatggataaattcctcgacacatgcaccctcccaaaactaaaccaggaagaagttgaatctctgaatagaccaataacaggctctgaaattgaggcaataatcaatagcttaccaatcaaaaaagcctaggagcagatggattcacagccgaattctaccagaggtacaaggaggagctagtaccattccttctgaaactattccaatcaatagaaaaagagggaatcctccctaactcactttatgaggccagcatcatcctgataccaaagccgggcagagacacaacaaaaaaagagaattttagaccaatatccttgatgaacattgatgcaaaaatcctcaataaaatactggcaaaccaaatccagcagcacatcaaaaagcttatccaccatgatcaagtgggcttcatccctgggatgcaaagctggttaaacatatgcaaatcgataaatgtaatccagcatataagcagaaccaaagacaaaaaccacatgattatctcaatagatgcagaaaaggcctttgacaaaattcaacaacattcatggtaaaaactctgaataaattaggtattgatgggacgtatctcaaaataataagagctatctatgacaaacccacagccgatgtcatactgaatgggcaaaaactggaaacattctctttgaaaactgacagaagacagggatgccctctctcaccactcctattcaacatagtgttggaagttctggccagggaaatcaagcaggagatggaaatagagggtattcaattaggaaaagaggaagtcaaattgtccctgtttgcagatgacatgattgtatatctagaaaaccccattgtcttagcccaaaatctccttaagctgttaagcagcttcagccaagtctcaggatacagaatccatgtacaaaaatcacaagcattcttatacaccaataacagacagacagccaaatcatgagtgaactcccattcacaattgcttcagagagaataaaatacctaggaatccaacttacaagggatgtgcaggacctcttcagggagagctacaaaccactgctcaaggaaataaaagaggatacgaacaaatggaagaacattccatgctcatgggtaggaagaatcaatatcatgaaaatggccatactgcccgaggtaatttatagattcaatgccatccccatcacgctaccgatgactttcttcacagaattggaaaaaactactttaaagttcatatgtttactctttctatttgagatttttgcaccccataattactgtattataatattcagtgtttttccatgtgctattgctagtgagttctgtaccttcagatgatttcttcttgctcactaactttttttcttttaggttaagatatccctttagcatttcttgtaggacaggtctggtgttaatgaaatccctcagtttttgtttgtcggaaaaagttcttatttttccttcaagtttaaaggacctttttgccagatacattattctaaagtaaaagtcttttttttccttcagcttttttaatatgtcatgccagtctcccagcctgtaaattttcccctgaaaagtctgctgtcagatgtattggagttccactgaaagttatttgtttctcttctctcgatgcttttagaatcatttctttatccttaacctttgggagttcagttaagtgccttgaggtggtcttctttgggttaaatctgctttatgttctgtaactttttgttactcgaatattgatatcaaatgttgaggaattgtttaatatgatttaatatatttatttaaataaatgttcaactcatctctttttctacctcctctttaaggccaataacacttagatttgctattttgaggctattttttaaattccataggcatgctttattttttattcttttttgtctcctctgactttgtgtttttaaatagtctgacttcaagttcactaaatctatcttcttcttggtcaattcttttaaataattctgatccattcttcagtatgacaatagcattttaacttcagaatttctgctttattcttttatttcaatctcattgttaaatttatctgatagaattttgaattctttctctgtgttattttgtacatttctttgaattaccacaacgagctattttggatttcctatatgaaaggtcacacatctctgttttttccaggatttgtccctagtgctttatttggcttctttggtgaggtcatgttttcctggatggccttgatacttgtagatgttcatctgtatctacacattgaagagttcagtctttactgtagtcttcacagtctgggcttgttagtgcccattatctttaggaacactttccaggtattcaaagaaacttgggttccaaacccaatagcacagtagtttatgcaaacacatagaggtactgccttggttgccttggattaacatcaagaaaaattctcgtgatttatcaagtaaagactcttgttctcttcccttactttctctcaaatcagcagtctctctttctgtgctgagacatgtgaagctggggttggggtaacataagcactcctgtggccaccaccactgagactgtgctgattcacacctgaagtaggcacagaacttggtctcacgcaaggcccactgcaacactacttggctaccatatgtttattcaaagccataggactctgtgattaatatgtggcaaagccagccgtgtttgtgtctctgcctatagggtggcaagttcccctagccatgagtgggtccacagatgctacctgggagccagagattaaagcatagaatcttcaaaatttacctgctcttctattttactgtagctaacctggcacttagggaataagacaaagtattttctactcttccttcccctgtctgcaggcagaagagcctcttctatgactgccaacactcctggccaatggggggtttccaccaaatcatcatcactttctcacttaaagcccaagcactctttaattagcttgtgataaattctgcaatgtctgggactcgacctttggccccgggcaagcgcagaaatgctgaccaagaagaccttaggcctggactcagggactctaagaatctgcttggtgctctaccccactgttgttgagctggcatatcaggtgcaacacagagttccctttactttcccacctgcttttctcaaacagaagtctttcaccatagctcccacagctggaaatgtattgggtcacacctgaagttggcgcttctcagagcccaatgcccatggtgtattacctggttgtcactgttttttattgtgggtacgggggttctttattcagcaggtgatgaattctgccagatctttactgacatggcagcactgagtttaatgcaaagtcctccagtcactgtgctctccctctcccaaattcacaggtttctctgtgttgtgtggctgctgctaggtgggagtgggcgagtggttttgtgagcactcccttagcttctctggctgttgtctcagtagactccattctccccaccctccacattccactggctctgagcccagctcggaatatgacttgcctaataattgaagtccttgtggcctagactgccccttaagttctcttagagtccaatagcacgtcaacacatgatggcaagacttgcaaaaactgaagctcccaatactgggatgggaggttttcctctttgtaaggccaatacaagtgctccccccattggcagatgtcagctgagtacagtctcgttctgcttttcactgtgacagggtagtactgagtttattgcaaagcctcacaaactatgctctccctctcccaaacatacaatctctgcacgatgtagccactactggtggttgaaaaagaggtggcatccttgcttctagaccgtcttttatttgtttgtcttctccaatgtctgtttctgtgatatgaagttaataccaggtactgtgattgctcacccaatttttggtccctttgacagtgcttcttgaatgtagtgagttgtgaaaatttggtgtttttgtgtggtggatgagaatgtaggcttctattctgccctcttattctgtctctgccttaaattttttagattcagggagtatatttgcaggtttattacatggatatattgtgtgatgctgagccatgtgggatattattgatcccatcaccaaggtagtgagcatatattgtgggatataattgatcccatcagctaggcagtaagcatagcactcatcgtttctcaccccctgccctcctccttccctccttcatctagtagttctcagtgtctattgttgtcatctttatattcatgagtaccccatgtttagatcctacttataggcaagaacatgtggtatttggttttctgttcctgtagtaatttccctaggataatggcctccagaagtatgcatgttgctgcacaggacatgattgtattatttttaatgtgtgcatagtattttacggtgtatatgtggcacatatttctatccaatttattgattaacacataagataattccatgccttccctattgtgaatagcaatatgacgcatatagaagcgcatgtggggtttctttttgtagaatttttaattttattttggacatatactcagtaatggaattgctggttgaatggtacttctgttttaaattctttgaaaaatctccaaactgcttttcacagtggctgaactaatttacattctcaccaacagtgtataagcatttcattttctctgaagtctagcaagaatttgttatttttttactttttaatagtagccattctgactaatctgagatgttatctcacattgatttgcatttctctgatgattattgatgttgaacattaagaaaacaaccccattaaaacattgacaagggacataagcagacacttcttaaaagaagatgagccaggcacagtggctcagacctgtaatctcagcactttgggaggccggggcgggcggatcacaaggtcaggagatcgagaccatcctggctaacacggtgaaaccctgtctctacaaaaaatacaaaaaattaaccgggcgtggtggcgggcgcctgtagtcccagctactcgggaggctgaggcaggagaatggcgtgaacccgggagacagagcttgcagtaagccaagatcgcaccactgcactccagcctgtgcgacagagcgagactccatctcaaacaaacaaacaaaaaaagatatagaagtgggattcttattctatcacaataagctgcctttcctttgcaaatacaaaatcaaaccattcgaaaaatcactttaattgtagggattgacagtatgtttccccttctctatctcctttcctcttttgtgattttttctgatcaccatcaatccactcagcagagtaatctccattcttactctgtgtgaattgtggtgatgagctagtcagctctcttaaaatcactaacaaaaagttttaaatttcctagttagtaataagtttttagcatgccacaagatactcttagaacaaggacttctggtccaggcattgtggattatgatgattatttctttggatttctataagctttgaaattaagaggtaaaaatctaaaataaatcagaccatgttatttatacattcattgggtttgttaattattccacaggaaaacagatgaaagacttttgtagaattcaattctgcttcaccatatttagggttacaagaagggaattatattgatgtaattgacagactgaattaacctcagtcatcacatgtgatttttctagaattttttttaatggtgctgacattctcttcaatatgtccatgcttagttgggtttctgggggagagatgagtagctagtactacccatccaaaacatcatgttcattagttggaataatggtgtgatatgatagtcttcaagatgatgccctcaattgctttcctccctgcatgcacatgctgctctttacattgacagttagagtcgaatctcccatttcttgaatctgtgctggtcacaatgacttgctttaccaataggatggagcagaagttgtattctaggacctccaaggctaggtcctaagaagctttgtggtatttgcctgtgtgccttgggaccaactaccaagttgtgagcactccaggtaacatggagaggtcagataggcatcacacccagcagccaatatgcactgccagccataagagtgacccgtctaggctctttagcctagttgagctttcaggtgagttcagcagcagccaaccaaccgcaactgcaagaaatactccaaaagagaacttttgtagtgcccaccaacccacaaaaccatgagaaataacattatttataatcactaaacaataacaataaacaatattaaattataaataattccttaagttttggaatggcttactattcagcaagagatagctagaacaagtactaaatattgcacaatactgaataagtgtaagtttagttgtataatatacttctacattttaaaggcattgacatttctggaaagagtgcaaaagcgagcactgattaaatggttcccaagagaagttttctgttgtatttcaacatcaccatttgccaatgggagctgtattttgtttttggaaaatatatatttcaaagttcattttaaaaaatatactaacaattttttagaaaggcatatgctattttgaaaaaaatttgagcaaaccagagaagtgtaaactttaaggctctaatcatatttttatgctatttaacccataaatccaaagtctgatgacaaacaagtttatctaatactgatatttggataaataagttaaactaacagttttctttttaaatgataggtcttataattggtatgatgttgagatggcttcagtggatgggctcatcaccataataatattttctctttaatacttttttagaacattaagtgacaaccaaagggtctaaaactgcgttacacagcagtaataaaatcagagtgacacttactttgcagcagcaggactggaattcttgctgttggggttggtggcagcaaactcaattatgggtgtcttctgcttcatgcttagatggtgtgttggaacatttcctgtttagaactttctaactcttcctaactagagctgttaaaaatagaaacaaactcctctgattttgaattcagcctgtttattgttatgatttgttcatatgtttctactctttagaccgtggatttcttgtagacagaaattgtatcttatacctctttttgttcagcagcggtgtgcctggcacctagttgaattgtcaggttcgttgaataagtaaagtaaaattatactagaagtaaactattaaatttatcaattttactcagaaaatatatagctaagtatgacgtaagaatcaattcactcactgattcaacgaacattttttaattgactacagtatgctatgagctaggaatatgacagcaaacaaatctcactttgtctcaaacttcagtggatccaggagtctctagaagtttaattcttgctcaatcagcaattccttttcactgaagacttgacaagaagttttgagaaggcaagagtgtgtgaactcggcagatgtttgtgatgcacctactgtgtgccagacactgtagtgtcacagggtctgccagtgtctcctaggaaaggtgaaaactaaggacaatattttaaacaagaaacaacgccaagtatgccacatgatggagagggaaagcactgggtcccaagagtataacaagcactgagcctagcgtggggtccaggtgtctctggcatcatgccctcctaggtcgtggttgtccctccttgttgctcctgctgtcttcttcagttacatcagcttctctgcatttcctcattttacagtgtgtgggatgcagtcatctctgaacaggaataggcaactgtgcacctgttacaccgtgcttgatgctctgcattgatgtacactgggcccaggtttccctggtggactgcttggcccgttcttgtcatctggctctgaagtctttgttcatagaggtgcacttgccagatggggaagccagagatctggggtcctctgatgaggccactctcgccctgcttatcttccctgacatacctaacagatgaagctcaggtgggcgatgcacctcaggccacagtgtggactgttgtaaccaagcgaattatagaggaaagccaccctttgagacaaattaagttgttctttattaaccagcgaccgagaggcagctaaagctcaaaattctcttggccccgaggaaggggctggttttgtttttataccgtggtctaaataggggaggggggagtttagctgtagcaatttttacagaagcagagctagagctagcaaactgttaaaaaaattaattggttacaaaagcagttacaaaaataaataaataaaccattccaggtgcaggggcttaaactatcacaaagagagaaatacaggggttttgggtgccattcaccgagcgcgtccccaggagctgctggtgcagcttgcctcaatatcttaatagtaagtgcattcctggacgtgctttgagtgagtttacactagttatgcccttaaggaagggaggtaaaggggctgcacgtgaagaaactaaaatggagtctgtccggctctctctccgctaggagagagtcactcaggttaaaacaaggtagggtatcacaggaccgtgtacaattattcaagctccagcttcaattctctttcttattgctctcttaggacagtatatttagatgggagtaaatgaaagtaatgttattaggggataagattaaaatcgatcccacttgtaaaaaatgaagattatttgtgagctgtgatactttttttagtgaagaatcaccttaaaacttggaacctggatacaagataattgcttcattctggaaaagtttagtagcaaactatatgccaggactgtgataattactagggatacatgattgaatatatagtataagatgccttggagtgtcagtttcatataaatggctcatgcagtatatagacagtgtggtaaaaagagactactgagatgtgcagaggacagaaaatgaagggtctttgaatggtagataaatgtgttcggacttttcactcagggctgttgaagtttttgaaggtcagtggtcttagagttttggtgttttcaagccctgctaagtactttgtttctagctgatgattggccaccattactgatcatctattggctctgtctgattcagcaatcccaccgctgagtatttatgcaaaggaaaaaaatcaatgtatcagaaagataactgtacttttatatttgttgcaacactattaacagtagcacagatataaaatcaacctaaatgtccatcaacaaatgattggaaaaagaaaatgtagaaaatatacacaatgaaatactattcaggcgtaaaaaacagtagaatcataatttttgcagacacatggatggaactggaggccattgttgtaagtgaagcaaaccagacacagagtaaacatcgtattttatcactcataagtgggtgctaaaagatgtgagggtattgatgtagagagtggaatgataaaggagactcagcagggtgaggggatggaaggggtgaatagtgagaaatttcttaatgggtacaatgtgcattattctggtgatggatacctgaaagccctgacttcaccactatgccatccatgcttacagcaaaattgcacttggagaccaaaaatttatacaaaaaaagtcttagacctctctcttttctctcataagcctcagagctcagtgatccccttggatctcctcagcctgctgagttttaactttcctacctaaggtgattttgggcagagacaagggagtgtttcaggaagacgttttcaggcatacgcttctaaagaaacattggagactctcctagtggcttttatctagtcactgctttaagcaaggaataaaacatctgtggctaaaattttaaaaactatgtttcccatccaccctttagacctgacagaagagattttaggattttaagggaacagctttttcctgacccaaaagggcacagtagtgcaaagaccaatgtcacgtaggtaccttttccccatctgtaaaataactttcccatactattcccacagctggaatcagtacaatgttttgactgaggtattggaaaagcctatgagctcattatcatttgaacgtatgagtaatgtaaaatttggtagaactttatttgaaaggattatttatgccatttttagttaactgatttatattacggttatttcaaacaataaaatcaggttgttatgtcgtaagctagaaaaatttacaatgacacaaggtcttcattatctcacatgatgaattgaagattaaagcaaaataatttagggaattctgtgacagtttctgtttcatgttgtttaataatgacttcaaactgttgtatatatatggagaactcctgactaaagagaatttttttgtctattgtgctatgtttctgtaactttttaagatctagaggaacacatatttagtctcagttggccaactaaatgttatggagtcagcttctgtgttatgtgctgtgcattgaagggatggtggagacaaggctgctgacctcgcagagtctgcggagaaaacctgatggagcgtggcagggaacatgctgggagcatcccaggatgccaaaagtgcacacagagggaacacctgccttagaagtggggagggtcagacaaggagagttgtcaggaaaaacgaggaaaatttaatctgcaggaatagaaacacacttgagaaatccatgtggaatgaaaagagaatggctgagcagcagcagattgtcaaaaaggaaatcaagaaggagcagccaaagaggtggatggagaaccacgagaaagaaggtgacactgaagccaagggaaagaaagtgtttcaacatttctgggaaaaaaaatgacattctccgtcttaaccttgttattttatgagtcatatagccacattccaggttctgagaagtccagcactaaagatgtttcttttagtttgcttaacccagcatttgcgggaataatctgagctcagtgtgagtgtgtgtgcgtgtgtgtgtgtgtgtgcgcctgtgtgttccactaatatctctctggggttagtgctctatacaacataatttttaaaacactggttttatccatcttattatgttcagctgcagcaatacttacaaaggtcaactttgattatgtgtcttagttactaaagaaaacaaaacaaactaatgaataaagcccacctggcagtggctcctcactacctgtacgatggagcccacctggcttggcctgcgtgccctgtgccgacctggccatgctgtcttctgcctgttgctttgcctcccctttcctcctggagaaggtagagatgctctgagatttggcccgtctggaacatgtgtccttctcctcatgtggaccatgttttcctgagtccactttaatcttgtttaagggtatagaactttacttaaagcttctggtcaggtctcactctgtatgctgtcttcctgccacttctactatgtacatatttaactgatacattaattatgctatatcagccaagggttttacttctatatcattttatatcatcatctttttttcttagagcttagttcacttatttattcagtctttccacactataattgtatgtcatataattttatatttattttcattggtgtttatatatcttttctgtaaaaatggaggctttctaaatagatcttcattaatgttgagagaacaaggttttaagtcgtggtctcagccaaaaggagttccccgcactaccaggagggaaagaagcacttgcattgttgcattagatgttcttacagagaaagagaaccatgtgtaatggaaaattgctaactatgcctcagggggaccaggttgattcggtgagaaagtttctattggtttagaaagcatagttctgagttttctaggagaaggagaaaaattagagtagggcataagaagtaatgcccatatcaaaaagttagaaagatctcaaattaacaacctaacatcacaactgaaagaattagagaagcaagaagaactcaaccataaagcttatagaagacaagaaataactgcaatcagagctgaactgaaagaaattgagacaagaaaaactgttcaaaagatcacttaatcaaggttttatgaaaaaaatactaagatagataaggcactagctagactaataaagaagaaaagagaaaagattcaaataaacaaaattagaaatgatgaagggaatgttaccactgaccccagagaaataaaaataacaaccagcaactactgtgaacacctctacacacacaaactagaaaccccagaagagacgaataaattcctggacacatacactctcttaagactgagccaggaagaaatttagtctctgaacagaccaattatgagctccaaaaattgaatccataataaatagcctaccaacccctcgaaaaagcccaggacctgatagattaacaaattttaacagatgtacaaagaagagccactactagtcctactaaaactatttcaagaaatacaggaggagggactcttccccaacttgttctacgagaccagaatcatcctgataccaaagcctggcagtgatacaacaaaaaaagaaaacttcaggccagtatccttgatgaacatccattcaataatctacaacaaaatacttgcaaaccgaatttagcaacacatcaaaaggctaattcaccatagtgaactaagcttcttccctggaatgaaaggttggtccatcatgggcaaatcaataaaatgtgatatgtaacataaataaaactaaagagaagaccacgtgattgtctcaacagatgcagaaaaggctttcagtaaaattcaacaaagcttcatgttaaaaattctcaataaatgaagtatcgaaggaacatacctcaaaataataaaggccacctatgacaaactcacagccaacattttactaaatgggcaaaatctggacgcattctccttgaaacccacacaagacaaggatgccctctctcaccactcctattcaacatagtattagaagtcctttctggagcaatcagacaagagaaagaaataaagcatatttaaatagaaagggaagtccaactatctctgtttgcagacaacataattctctatctaaaccctatagttgtgacccaaaagctctttaagcagataaacaacttccacaaagtttcaggacacaaaatcaatgtacagaatttgctagcattcctatataccaagaagagtcaaactaagagccaaatcagagaggcaattttattcacaatttccacaaaaagaataaaacatgtacgaatacagctaaccagggagttgaaaaatctctacaatgaaaattacaaaacactgctcaaagaagtcagagaagatacaaacaaaagaaaaaccattccatgttaatggagagaaagaattaatataatttaaatggtcgtactgccaaaagctattcctattaaaccagcaatgacatgattcatggaagtagaaaaaagctatttagaaattcatatagaaccaagaaagaacctaagtagccaaggcaatcctaagcaaaaagaacaaagcttgaggcatcacattacctgacttcaacctatactatagcactatagtaaccaaaacagcatggtactagtacaaaaacagacacatacaccaatggagcagaatagagaagttagaaataagaccacatacctacaactatctaatatttgacaaagctggcaaaaacaagcaatggggaaaagattccctattcaataaatgatactggaataactggctagccatatgcagaagattgaagttggacttcttccgtataccatacgcagaaatcaatccaagatgggttaaatacttaaatgtaaaacccaaaactataaaagccctggaaggcaagctaggcaataccattctggacatagaaagagacaaagatttcatgataaagacaccaaaaacaacaaatgcaactattgacaagtgagatctaattaaacttaaaagcttctgttcagcaaaagaaattatcaatagagtgaacaaacaacatatagaatgagaaaaaatatttacaaactatgtatctgacaaagatctaatattcaatataaggaacttaagtttacaagagaaaaacaaaaaaccctattaaaaagtggccaaagccctgacttctgaatggcacttctggacccagccagggactgagggatctcactgccctaaaggaaagaacacaggactctctggctttgccacctgctaattgtagagaccaaaggccttgagtgaacataggcagtcgtcagaaagtgcatgcagaagaacttgagcaagatccggtgctgtgctagtttcaggtctgatccagggcagtcatagtggtggtggccagcggtgcttgtgtctttcttctctctttctaagctttaggtggcttagaatagagagaaagactctgtatctttgagagaaaataagggtaaggaaaaagtctctggctagtaatccagaaaattctcctggatcttgttgaaggctgtcaaggtggtacttctctgagtctggaagaattaccgcattattgggtataaggtgccccataaagcagatatggcttagatcacaacacccaagtttttttcaaatatgtgaaaagccttcccaagaaagacagctacaaataagcacagacagtgaagactacaataaatactcacctatactctttttaaattttatttttttaaacctctcatatggtgctacatgcccaagattttaatgtccagacactgaagaacatctactagcatcaacactgtccaggaaaacatgacctcaccaagtgaactaaataaggtaccagggacaaatcctggagaaaaagagatatgtgacatttcagacagagaattcaaaatagctgtatttaaaaaaaactgaaagaaatttaagataacaaagtaaagaaattccaaattttatcagctaaactcaaaaaagagattgaaatagttacagcgaattaagcagaaattctggagctgaaaaatgcagttggcatgctgaacaatgcattagagccatgtaatagcagaatggatcaagcagagaagacaggctctttgaaaatacatagaagagacaaaagaaaaagaataaaaacagcaaatcatgcctacaggatctagaaaataacctcacaaagacagatctaagagttattggttttaaagaagatgtagagaaagaggcaggggaggatctagaaaatcgccccacgaagacaaatctaagacagacccaagctgtgtcctgtgagcaggctcggcgccactgcttccaccacagggcaggagcactctacaactttcagagcccacagcaccaagaggacagggaggagccaacaaaggaatgaccctaggaaacacacacccaaagcaacaaaccaatccaagtaaaaacatgtctcagggctccgttggttttcccgtgtgggcagccctgcccccctgttccagcccggcccaggcaccctcgaccctaccctcgccaaaggggcccctgtctaccagagcagagcctccctctccaaggctctgttgctccccctctctagctccctcaccctctccctttctctacttccctctccaccttgcgtgctctctctctcaatctcccaggttcttctctgtctttctctcgatcgctgtttctcactctccttccgtttctatctctccatctctctgtcccttgttcttcttcaagctgtctgtgtctttgtgtgtctgtgtgtgtgcttgtgttcccacgcgtgcgcccctgtgtatctgtgtgtttgggagtgggtttgctagtgactgtggtggggtgtgtctggatgtccctcagaacctttgtgccaggatcaggctgccaactcttagccagcgcgtgggtgtcacagttgccgtaatagtctcacacacgcaggtgtgtggatctcgtttattttcatgtagacaaggagagcgaaaccacagagaaaagaaacgtcccatgcatcacgtcctgaagaatgattcctgtttcctgaaaaatggggagtctccaatatagcctgtttgaaaactggaaaggagagcgacacgatgctggtcttccatgtatttctggaagtttctggggccccacagaggtcgggaaacaaacagtcaacatggtcacactttccagggtgcagagacttgtgctgggcccactgtctggcatgccctagtgagatgaacacagaacctcagaaggaaatgcagaaatcacccgtcttctgcgtcgctcacgctgggagctgtagactggagctgttcctattcggacatcatccggagaaccttctttgtgatgtgtgcattcatctcacagagttgaacacttcttttgattgagcagttttgaaacactttttctgtagaatctgcaagtggatatttggagcgatttgaggcctattgtcgaaaaggaaatttcttcacataaaaactacacagaagcattatgaggaacttctttgtgatgtgagccttcatctcacagagttgacatgttcttctgattgagcagttttgaaacactctatttgtagaatctgcaagtggatatctggagcgctttgaggcctattatgacaaagcaaatatcttcacataaaaactacaaagaagcattctgagaaactattttgtgatgtgtgcattcatttcacagaggtgaaactttcgttcgattgagccgttttgaagcactctttttgtagaatctgaaagtcgatatttgcagccctttaaggcctagtgtggaaaagcaaatatcttcacataaaaactacacagaagcattctgagaaacatctttgtgatgtgtgcattcatctcacagagttgaacatttttttgattgagcagttttgaatctctctttttgcagaatctgcaggtggatatttggagccctttgaggcctactgtggaaaagcaaataacttcacataaaaactacacagaagaactctgagaaacttctttgggatgtgtgtattcaactcacacagttgaacctatcttttgattcagcagtttgaatctctctttttgcagaatctataattggatatttggagccctttgggacctatggtggaaaaggaaatatcttcaaataaaaactacacagaaatattctgagaaacttcgttgtgatgtgtgcattcatctcacagggttgaacctatcttatgagtgagcagtttagaaacactctttttgtagaatctgcaagtggaaaattggagcgctttgaggccgaccgtagaaaagcaaatatcttcacataaaaactacacagaagcattcagagaaacttctttgtgatgtatgcattcaactcacagagctgaacctatatttgattgagctgttttgaatcactctttttgcagaatctacaggtaaatatttggacccttggaggcttactgtagaaaagcaaatatcttcacataaaaactatacagaaacattctgagaaactactttgggatacgtgcattcaactcacagagttgaacctatcttttgattgagcagttttgaatctctctttttgccgaatctgcaagtggatattaggaagcctttgcagcctaaggtggaaaaggaagtatcctcaaataaaaactacacagaagaatcctgagaaacttctttgtgatgtgtgcattcatctcagagagttgaacttttcttttgattcagcagttttgataccctttttgtagaatctgcaagtggatatatggagctcattgaggcctattgtggaaaaggaaatatcttcatataaaaactacacagaagcattctgagtaacttctttgtgatgtgtgcattcatctcacagaattgaacctttcttttgattgagcagctttgaaacactctttttgtagaatctgcaagtgggtaattggagccctttgaggcctgttgtggaaaaagaaatatcttcacataaaaactactcagaaacattctaagaaacttctttgtgatgtgtacattcaattcaaagagatgaacctatcttttgatggaccaggttagaatctctctttttgtggaatgtgaaagcggatatttggagccctttgtgccctatggtaaaaaagaaaatatcttcaaataaaaactacacagaagcattctctgatactacttcgtgatgtgtgcattcaactcacagagttgaacctgtcttttgattgagcagttttgaatctctctttttgtacaatctgcaagtggatatttggagcgctgtgaggtctactgtggaaaatcaaatatgttcacatgaaaactacaaaaaaccattctgagaaacttctttgtgatgtgtgcattcaactcacagagttgaacctctcttttaattgagcagttttgaatatctctttttgcagtatctgcaagtggataattggagtgctttcaggtctaatgtggaaaagcaaatatcttcacataaaaactacacagaagcattctgagaaacttctctgtgatgtgtgcattcatctcagagagttgaaactttcttttcattgagcagtgttgaaacactctttttgtaggatctgcaggggatatttggagcccctagagacctattgtgaaaaaggaaataccttctcataaaaactacacagaaacattcagagaaacttctttgtgatgggtgcattcatctcacagagttgaacatttcattttattgagcaattttgaaacactctttttgtagaatctgcaagtggttaattggagccctttgtggtgtattgtggaaaaagaaatatcttcacataaaaactactcagaagcattctgagaaacttctttgtgatgtgtgcattcaactcacagagttgaacctatcttttgattatgcagtttagaatctctctctttgtagaatctgtaagtggctatttggagccttttgggccctatggtggtaaaggacatatcttcaaataaaaaccgcacagaagtattctgacaaagttctacgagatgtgtgcattaaactcacagagatgaacctatattttgattgagcagttttgaatctctctttttgtagaatctgcaactggatatttgcagccctgtgaggcctactgtggaaaatcaaatatgttcacataaaaaccaaacagaagcattctgagaaaattctttgtgatgtgtgcattcaactcccaacgctgaactaccttttgactgagcagttttgaatctctctttttgcagaatctgcaagtggatatttggagagctttgaggactattttggaaaaggaaataacttcaaataaaaactacacagaagcattctgagaaacttctttgtgaggtgtgcattcaactcacagagttgaacctatcttctcattgagaagtttagaatctctcttttgtagaatctgcaagtggatatttggagcactttgaggcctaccgtggaaaagcaaatatctgcagataaaaactacacagaagcattatgagaaacttctttgtgatgtatgcattcatctcacagagttgaacatttcttttgattgagcagttttgaatctgtctttttgcagaatcggcaggtttatatttggagattttgaggtctactgtgtgaaagcaagtatcttcacttaaagactacacagaagcattctgagaaaatcctttgggatgtgtgaattcatctcacagagttgaacttttcttttgattgagcagttttgaaacactcttttgtagaatctgctagtggataattggagccctttgagacctattgtggaaaagcaaatatcttcacataaaaactactcagaagcattctgagaaacttctttgtgatgtgtgcattgaactcacagagttgaacctaccctttgattgagcagtttggaatctctctttgtagaatttgtaagtggatatttggaaccctttgcaccctaaggtggaaaaggaaatatcttcaaacaaaaaattcacagaagcattctcagaaactacttcgtgatgtgtgcattcaactcacagagctgaacctatcttttgattgagcagttttgaatctctcttttgcagattctgccagtggatatttggagggctgtgaggcctattgttgaaaatcaaatatgtttacataaaaactacacagaaacattctgagaaacttctttgtgattggtgcatttatctcacagttgaacccttcttttgattgagcagttttgaatctctccttttgcagaatctgcaagtggatatttggagagctttggggcctgttgtagaaaaggaaatatcttcacataaaaactacacagaagtattcttacaaacttctttgtgaggtgtgcattaactcacagagttgaatatatcttctgattgagcagttttgaatctctctttttgtagaatctgcaagttgatatttggagccctttgtgccccatggtggaaaaggaaataccctcaaataaaaactacacagaggcattcagagaaacttctttgtgaggtatgcattcacctcacagagttgaacgtatcttttgattgagcagtttgaatctctctttttgcagaatcggcaggtttatatttgaagcctttgaggcctactgtgtaaaagcaaatatctcacttaaagactacacagaagcattctgagaaaatcctttgggatgtgtgaattctactcacagggttgaacctatcttttgattgagcagttttgaatctctccttttgtagaatctgcaagtggatatttggagccctttgtggcctactttggaaaaggaaatatcttcaaataaaaactacacagaaacattctgagaaactactttgtgatgtgtgcattcatctcacagggttgagcctatcttatgattcagcggttttgaaacaatctttttgtagaatctgcatgtggatatttggagcactttgaggcctaccgtggaatagcaaatatcttcagataaataaaacagagaagcattctgagaaacttctttgtgatgtgtgcattcaactcacatagttgaaaccttcttttgattgagcagttttgaaacacacttattgtagaatctgcaagtggatatttggagaccttcgaggcctactgtgtaaaagaaatatcttcatataaaaactacacagaagcattctgagaaacttctttctgatgtgtgcattcaactcacagagttgaacctgtcttttgattgagcagttttgaatctctattttgtagaatctgcaagtggatagttggagcgctgtgaggtctactgtggaaaatcaaatatgttcacataaaaacggcacagaagcattcttagaaacttgtttgtgatgtttgcattcatctcacagagttgaacctttcttttgattgagcagttttgaaacactctttttgtagaatcttcaagtggatatttggagccctttgaggcttattgtggaaagggaaatatcttcacataaaaactacacagaagcattctgagaaacttcttgtgatgtgtgcattcatctcacagggttgaatcttgcttttgattgagcagttttgaaacactgtttttgcagaaactgcaagtggaaaattggcctcctttgaggcctattgtggaaaaggaaatatcttcaaataaaaagtactcagaagcattctgagaaacttctttgtgacgtgtgcattcaactcacagaggtgaaactatcttttgagcagtttagaatctctctttttgtagaatctgcaagtggatagttggagccatttgtgccttatggaggaaaaggaaatatctttaaataaaaactacacaggaaaattctcagaaatttcttcgtgatgtgtgcattcaactcaaagagttgaacttatcttacgattgagcatttttgaaaccctctttttgtattatctgcaagtggatatttggaacgctttgaggcctaccatggaaaagcaaatatctttagataaaaactacagagaagcattctgagaaacttctttgtgatatgtgctttcatctcacagtgttaaacttttcttttgattcagcagttttgaaagactctttttgtagaatctgcaagtggataattggagccctttgaggcctcttgtggaaaaggaaatatcttcacataaaaactgcacagaaggattctgagaaacttctttgtgatctgtgcattcatcccacagatttgaagcttccttttcattgagcagtttggaaaaactctttttgtacaatctgccagtagacatttggagccccttgacacctattgtggaaaagaaaatatcttcacataaaacctacacggaagcattctgagaaacttctttgtgatgagtgatttcaattcacagggttgaacctctcttctcattgagcagttttgaatctttttgcagaatctgcaagtggatatttggagccctttgtggcctatggtagaaaaggaaatatcttcaagtaaaaactacacagaaacattctcagaaacttctttgtgatgtgtgctttcatctcaaaggtttgaggctatcttatgattgagtagttatgaaacactctttttgtagaatccacaagtggatattttgatcactttgaggcctactgtggaaaaggagttaccttcagttaaaaacggcacagaagcattctcagaaacttctttgtgatgtgtgcatttatctcacagagttgaacatttcttttgattgaacagttttgaaacactttttgtagaattttcaagtgaatatatgcagccctttgacgcctattctggaaaaggaaatatcttcacataaaaactacccagaagcactctgagaaacttctttgtgaggtgtgcattgaactcacagagctgacactttcttttgattgagcagttttgaaacacaccttttgtagaatctgcaagtggatatttggaaccctttgcaccctatggtggaaaaagaaatgtcttcaaataaaaactacacagaagcatttagagaaacttctttgtgatgtacgctttcaactcacagagttgaacctatcttttgattgagcagttatgaatctctctttctgcagaatctgcaggatgatatttggagccctttaaggccttccgtggaaaagcaaatatcttcactaaaaaactacacagaagcattctgggaaaattctttggaatgtgtgaattcaactcacaggtttgaacctttcttctgattgagcagttttgaatctttttgcagaatctgcaagtggatatttgaagccctttgcggccgatcgtagaaaaggaaatatcttcaaataaaaacttcacagaaacattctgagaaacttttttgtgatgtatacattcatctcacagggttgagcctatcttatgattgagcagttttgaaacactctttttgtagagtctgcaagtggatacttggagcgctttgaggcctaccgtggtaaagcaaatatcttcacataaaaactacacagaagcattctgagcaacttcttagtgatgtgtgcattgtactcacagtgttgagattgagcagtttcgaatccatctttttgtaggatctgcaacgtggatatttggagcccttgcaccgtatggaggaaaaggaaatatcttcatataaaaactacacagaagcattctcagaaacttcatcgtaatgtgtgtattcaactcacagaattgaacctaacttttgattgaacagttttgaatctctctttttgtaaaatctgcaagtggatatttggaccactgtgagacctaatgtggaaaatcaaataagttcacataaaactacaaagaaacattctgagaaactacgttgtgatttgtgcatgcaactcacagaggtgaacctacctttcgattgagcagttttgaatctctccctttgcagaatatgcaggtggaggtttggagatctttgaggccaattgtggagaagaaaatatcttcacataaaaagtacacagaagcgttctgagaaacttctttgtgaggtgtgcattcaactcacagagttgaacttatcttctcattgagcagctttgaatccctctgtagaatctgcaagtggatatttgaagccctttggccccatggtggaaaaagaaatatcttcaaataaaaactacacagaagcaatcggaggagcttctttgtgatgtatgcattcaactcacagagttgaagctatcttttgattaagcagttttcaatctctctttttgcagaatctgcaagtttatattttcagccctttgaggcctactgtggaaaagaaaatatcttcacttaaaaactacacagaggcattctgagaaaatactttgtgatttgtgcattcatctcacagagttgaaactttcttttgattgagcagttttgaaacactctttttgtagaatctgcaagtggatatttggagccctttgaggtctattgtggataaggaaatatcttcacataaaaacttcacataagcattctgataaacttctttgtgatgtgtgcattcatctctcagagttgaactttcttttgattgagcagttttgaaacacacttgttgtagaatctgcaagtggtcatttgaagccctttgaggtctattgtggaaaagaaatatcttcacataaaaactacatagaagcattctcagaaacttctttgtgatctgtgcgttcatctcacagagttgaatctttcttttgatacagcagttttgaaacactctttttgtagaatctgcaagtggatatttggagctcattggggcttactgtggaaaaacaaatatcttcacatagaaactacacagaagcattctgagaaacttctttgtgatgtgtacattcatctcacagatttgaaactttcttttcgttgagcagttttaaaactctctttttgtagaatctggaagtggataataggagcccatagaggcctattgtggaaaagaaaatatcttcacttaaaagctactcagaagcattctgagaagcttctttgtgatgtgtgcattcaactcacagagttgaaattatcttttgattgagaaggtttgaatttctctctttgtagaatctgcaagtggatatttggagccctttgcacactatggtggaaaaggaaatatcttcaaataaaaactacacagaagcattctcagaaacttcttcatgatgtgtgcattcaactgacagagttgaacctatcttttgattgagcagttttgagtctctcttttgtagaatctgaaagtggatatttggagcgctgtgaggcctactgtggaaaataaaatatcttcacataaaaactacacagaagaattctgagaaatttctttgtgatgtgtgcattcatatcacagagttgaacttttcttttgattgagcagttttgaaacactctttgaagaatctgcaattggataattggagccctttgaggcctactgtggaaaagaatatatcttcacataaaaactactcagaagcattctgagaaacttacttatttgtgatgtgtgcattcaactcacatagttgaacctatcttttgattgagtagttttgaatctctctttttgcagaatctgcaagtggatgtttggagagctttcaggcctattgtggaaaaggaaatattttcacataaaaactacacagaaccattctgagaaacttctttgtgtcgtgtgcattcaactcacagagttgaacttatgtcctctttgagcagttttgagtctctctttttgtagaatgtgcaagtggatatttggagcccattgtgtcctatggtagaaaaggaaatatcttcagataaaaactacacagaagcattctgagaaacttctttgtgatatgtgcatttatcttacaggtttgaacctaccatattattgagcagttttgaaacactctttttgtagaatctgtaaatggatatttggagggaattgagatctaccatggaaaagcatatatctgcagacaaaaactaaacagaagcattctgagaaacttctttgtgatgtgtgcattcatctcacagagttgaaactttcctttgattgagtagttttgaaagactctttttgtagaatctgtaactggatatttggagccctttgaggaatattgtggaaaaggaaatatcttcacataaaaactacacagaagcattctgagaaacttctttatgaggagtgcattcaacccacagagttgaacttttcttctcattgagcagttttgaatctctctatttgtagaatctgcaagtggatatttgctgccctttgaggcctactgaggaaaagcaaatatcttcatataaaaactacacagaagcattctgagaaacttctttgggatgtgtacattcaactcccagagttgaacctatcttttgattgagcagttttgaatctctcttttggcagaaactgcaagtagatatttggagccatttgtggcctttggtggaaaaagaaatatcttcaaataaaaactaaacagaaacatactgagaaacttctttgtgatgtgtgcattcatctcacagggttgaacctatcttatgattgagcggttttgaaacactccttttgtagaatcaggaagtgtatatttggagcgctttgaggcccaccgtggaaaagcaaatatcttcagataaaaactacacagaagcattctgagaaacttctttgtgatgtgtgcattcatctcacaaaggtgaaccttacttttgattcagcagttttgaaagactctttttgtagaatctgcaagtggatatttggagccctttgatggctattgtggaaaagtaaatatcttcacataaaaactactcagaagcattctgataaacttctttgtgatgtatgcatgcaactcacagaattgaacctatcttatgattgagcagttttgaatctctctttttgcagaatctgtaactgaatgttttgagcgccttaaggcctactgtggaaaagcaaatatcttcagataaaagctacacagaagcattcagagaaacttctttgcgatgtttgcattcatctcacagagttaaaactttctcttgattgagcagttttgaaacactctttttgtagaatctgcaagtggatatttggagccctttgaggcctattgtggaaaaggaaatatcttcccatgaaaactacatagaagcattctgggaaacttctttgggatgtgtgcattcaactcacagagttgaacctatcttttgattgagcagtttggaatctctctttttgaagaatctgcaagtgtgtgttttcaaagctttgtggcctattgtggaaaaggaaatatcttcacataaaaactacacataaacattctgagaaagttctttgcggtgtgtgcattcatctcacggagttgaaactttcttttgattgagcagttttgaaacactctttttgtacaatctgcaagctgataattggagccctttgaggactattgtggaaaaggaaatatcttcaaataaaaactactcagaagcattctgataaacttctttctgatgtgtgcattcaactcacagagttgaacctatattttgattgagcagtttagaagctctctttttgcagaatctgcaagtggatgtttggaaagcttggaaacctattatggaaaaggaaacatcttcacataaaaactacacagaagcattctgagaaacttctctgtgaggtgtgcattcaacccacagagtttaacttattttctcattgagcaattttgaatctctctttttgtaaaatctgcaggtggatatttggagccctttgcaccccatggtggaaaaggaaatatcttcaaataaaaactacatggaagcattcatagaaacttctttgtgatgtatgcattcaactcacagagttgaaactatcttattattgagcagttttgaatctctctttttgcagaatctgcaactggatatttggagcgctttgaggcctaacgtggaaaagcaaatatcttccgataaaagctacacagaagcattctgagaaacttctttgcgatgtgtgcattcaactcacagagttgaaactttcttttgattgagcagatttgaaatactctttttgtagaaactgtaagttgatatttggagccctttgagtcctattgtggaaaaggaaatatcttcacataaaaactacacggaatcattctgagatacttctttgtgatgcttgcattcatctaacaatgttgaaactttcttttcattgagcagttttgaaacactctttttgtagaatctgcaagtggaataattggatccctttgcgccctgtggtggagaaggaaatatcttcaaataagaactacacagaaacattctcagaaacttatttgtgatgtgagcattcaactcacagacctgaacatatcttttgatttagcacttttgaatttctctttttgtagaatttgcaagtggatatttggagcgctgtgagacctactgtgggaaatgaaatatgttcacataaaaactactcagaagcattctgagaaactactttgtgatgtatgcattcaactcacagagttgaacctaccttttgatgaagcagttttgagtctctctttttgcataatctgcgagtggatgtttggagaactttgaggcctattatgtaaaaggaaatattttcacataaatactatacagaagcattctgagaaacttctttgtgacgtgtgcattcatctcacagagttgaacctttcttttgattgagcagttttgaaacactctttttgtagaatctgtaagtggatatttggagccctttgaggcctattgtggataaagaaatatcttcacataaaaactacacagaagcattctgagaaacttccttgggatgtgtccattcatctcaccgagttgaaactttcttttgattgagcagttttgaaacactcttttgtagaatctgtgagtggatatttggagacatttgaggcctgttgtggaaaggaaagatcttcacataaaacctacacagaagcattctgagaaacttctttgtgaggtgtgcattaaactcacagagttgaacttatcttctcattgagcagttttgaatctttctttttgtagaatcttcaagtggatatttggagccctttgcgccctatggtggaaatggaaatatcttcaaataaaaactacacagaagcattcagaggaacttctttgtgatgtatgcattcagctcacagagttgaacctatcttttgattgagcagtttagaatctctttttttgcagaatctgcaggtgaatatttggagccctttgaggcctacagtggaaaaccaaatatcttcacataaaaactacacagaagcattgtgtgaaactcctttgggatgtgtgcattcaactcacagagttgaacatatcttttgattcagcagttttgaatatctcttgttgcagaatctgcacgtggaaatttggaggcctttgtggcctatgttggaaaaggaaatatcttcaaataaaaactccacacaaacattctgagaaacttcttcatgatgtgtgcattcatctcacaaggttgaacctatcttatgattgagcagttttgaaacactctttttgttgaatctgcaagtggatctttgcagcgctttgaggcctaccatggaaaagcaaatatcttcagataaaaactacacagaagcattctgagaaactacttggtgatgtgtgcattcatctcacagagttgaacctttcttttgattgagcagttttgaaaccctctttttgtagaatctgccagtggatatttggagccttttgaggcctactgtggataaggaaatatcttcatataaaaactacacagaagcattctgagaaacttctttgtgatgcgtgcattcatctcacagagttgaaattttttttgcgttgagcaattttgaaacactctttttgtagaatctgcaagtggataattggaaacctttgagagctaacgtggaaaaggaaatatcttcacaaagaaaccactcagaagcattctgtgaaagtactttgtgatgtgtgcattcaactctcagatttgaacctatcttttcattgagcactttagaatctctctttttgtagaatctgcaagtggataactggagtcctttctgccctttggtggagaaaggaatatcttcaaataaaaactgtatagaagcattctcagtaacttcttcgtaatgtgagcattgaactcacagagttcaacctttctttttattgagatggtttgagtctctctttttgaagaatcggcaagtggatatttgaatcgcagtgaggcctactttggaaaatcaaatatgttcacataaaaactacacagaatcattctgagaaacttctttgtgatgtgtgcattcatctcacagggttgaacctatcttatgattgagcagttttgaatcactctttatgtagaatctgcaagtggatatttggagcgttttgagacctaccgtggaaaagcaattatcttcagataaaaactacacagaagcattctgagaaactgctttatgatgtgtgcattcatctcacagagttgaacctttcttttgattgagcagctttgaaacactctttttgtagaatctgcaagtggatatttcgtgtgctttgagtcctaccatggaaaaggaaatatcttcacataaaaaatactcagaggaattctgagaaacttctttgtgatgtgtgcattcaactcacagaattgaacctatctttagattgagcagtttagaatctctctttttgcagtatctgcaagtggatatttggagccctttgcagcctgtggtggaaaagaaaatatcttcacacaaaaactactcggaagcattcttagaaacttctttttgatgtgtgcattcaaatcacagagttgaacctatattttcattaagcagtttaaaatctctcctttgcagaatctgcaagtggatatttgaagccccttgtggcctatggtggataaggaaatatcttcaaataaaaactacacagaaacattctgagaaacttctttgtgatgtatacatttatctcacagggttgaaactatcttatgacagagcagttttgacacactctttttgtagaatctgcaagtggatatttgcagccctttgaggtcttttgtggaaaaggaaatattttctcataaaaattacagagaagcattctgggaaacttctttgtgatgtgtgcattcatctcacagagttgaaccttttttttcattgagctgttttgaaaactctttttgtagaatctgcaagtagatatttggagcaatttgaggcgtattgtggaaaaggaaatatcttcacataaaaactatactgaagcattctgagaaacttctttgggatgtgtgcattcatctcacagagttgaatctttcttttgatggagcagttttgaaacaatctttttgtagaatcttaaagcggatatttggagcaatttgaggcctattgtggaaaaggaaatatcttctcacaaaaactacacagaagtattctgagaaacttctttgtattgtgtgcattcaactcacagggttgcacctatctatttattgagcagttagaatctctctttttgtagaatctgcaagtgtatatttggagccctttgggccctattgtggaaaaggaaatatcttcaaataaaactacgcagaagcattcagagaaacttctttgggatgagtgcatttatcacacagagttgaacctttctttggatagagcagttttgaaacactcttttcgtaggatctggaagtggataattggagggctttgaggcctgttttgtagaaggagatatcttcacataaaaacaacaaagaagcattctgagaaacttctctgtgaggtgtgccttcaacttacagtgttgaacgcatctttttattgagcagttttgaatctctctatttgcagaatctgcaagtggatatttggagccctttgggggctactgtggaaaagcaaatatcttcacatataaactgcacagaagtattctgagaaacttctttgtgatttgtgcattcaactcacagagttgaacctaccttttgattaagcagttttgaatctctctttttacagtatctgcacttggaaacttggagccatttgtggcctatggtcgaaaaggaaatatcttcaaataaaaactacacagaagcattcagagaaacttctttgtgatatgtgcattcattttcacagggttgaacctttattatgatttagcagttgtgaaacactctttttttagaatctgcaagtggatatttggagccctttgaggcctgctgtggaaaagcgaatatcttcagataaaaggtacacagaagcattctgagaaacatctttgcgatgtatgcattcattcacacagagttgaacctttctattgttgaacaattttgaaacacttttttgtagaatctggaagtggatagttggagggctttgaggtctatttttgaaaacgaaatatctccacataaatactacacagaaatattctgagaaacttctttgttatgtgtgcattcaactctcatagttgaacttatcttttgattgagcagttttgaatctctctttttgcagaatctgcaagtggatattcggagccctttgaggcctgctgtggaaaagcaaatatcgtcacataaaaactacacagacgcattctgggaaacttctttttgatgtgtgaattcaactcacagagttgaagctatcttttgattgagcagtttatcatctctcttttttcagaatctgcaagtgaatatttggaatgatttgaggcctcatgtggaaaaggaaatgtcttcacctaaaaactacacagtagcataaggagaaacgtctttgtgatgtgttttttccaactcacagagttgaacctatcttttgattgagcagtctaaaatctctctttttgtagaaactgcaagtgggtatttcaagccctttgtgccctgtggtggaaaaagatatatcttcaaataaaaactacacagaagcattcagagaaacttctttgtgatgagtgcattcatctcacagagttgaaactttctttcgatggagcagttttgaaacactcttttcgtagaatctggaagtggatatttggagggctttgaggcctattttggagaaggagatatcttcacataaaaactacacagaatcattctgagaaacttctttgtgtcttgtggattcagctcacggagttgaatctatcttttgattgagcagctttgaatctccctttttgcagaatctgcaagtcgatatttggagcgctttgaggcctactgtggaaaatcaaatatcttcacataaaagctacacagaagcattctgagaaactgcttagtgatgtgtgcattcatctcacagtgttgaaactttgtttttattgagcagttttgaaacatattttttgtagtatctgcaagtggacattttgagccatttgaggcgtattgtggaaaaggaaatatcttcccattaaaaactacacagaagcattctgagaaacttctttgtgatgtgtgcattcaactcacagagttgaacctatcttttgattgaaccgtttagaatctctttttgtagaatgtgcaagtggatatttggagtcctttgcgtcctatggtggaaaaggatatatcttgaaataaaaactacacagaagctttcagagaaacttctttgtgatgactacattcgtcacacagagttgaacctttctttggattgtgcagttttgaatctctctttttgtagaatctgcaagtggatatttggagcgttttgaggcctactgtggaacataaaatatcttcacataaaaactacacagaagcattctgagaaacttctttgtgatttgtgcattcatctcacagagttgaatttttcttttgattgagcagttttgaaacactctttttgtagaatctgcaagtggatatgtggagccatttggggcctattgtggacaaggaaatatcttcacataaaaactacacaaaaggaccctgagaaacttctttgtgaggtgcgcattcaactcccagagttgaaagtttctttggtttgagcagttttgaaacactcttttggtagaatctggaagtggatatttggtgggctctgaggcctattttagagaaggagatattttcacataaaagctacagagaggcattctgagaaacttctttgtgatgtgtgcatttaattcacagagttgaaactatcttttgattgagcagtttttaatctctctttttgcagaatctgcaagtggatatttggaaccctttgaggcctgctgtggaaaagcaaatatcttcacataaaaactacacagaagtattttcagaaactcctttgggatgtgtgcattcatctcacagagttgaacctatcttttgattgagcattttttaatctctcttcttgtagaatctgcaagtggatatttggagccctttgcgacctatggtggaaaaggaaatatcttcaaataaaaactacacagaagcattctgaaaaacttctttgtgatgagtgaattcatctcaaggggttgaaccatcttatgattgagcagttttgaaacactctttttgaagaatctgcaagtgtatatttggtgggctttgaggaataccgtggaaaaccaaatatcttcagataaatctgcacagaagcattctgagctacttctctgtgatgtgtgcattcatctcacagagttgaaactttgttttgtttgaggagttttgaaacactgttttagtagaatctgcaagtggatatttggagggctttgaagcccactgtggaaaagcaaatatcttcagataaaagctacccagaaacattctgcgaaacttctttgtgatgtgtgcattcaactcacagagttgaatgtctctgttgattgagcagttttgaatctctatttttgtagaatctgcatgtggatatttggagccctatgtggcctatggtggaaaaggaaatatcttcaaataaaaactacacagaagcattctgagaaactgctttgtgatgtgtgcattcatctcacagggttgaacatatcttatgattgagcagttttgaaactctctttttgtagaatgtgcatgtggatatttggagtgctttgaggcctaccgtggaaaagcatatatcttaatataaaaactactcagaagcattctgagaaacttctttgtgatgtgggcattcatctcacagggctgaacctttcttttgattgagcagttttgaaacactctttctgtaaattctgcaagtggatatttggagcttctgatgcttattgtggaaaaggagatatcttcacataaaaattacacataagcatcctcagaaacttttttgtgatgcatgcattcatctcacagagttgaaaatttcttttcatttagcagctttgaaacactctttttgtagaatctgcaagtggatatttggagtgctttgaggcctagtgtggaaaagcaaatatctgcacataaaaactacacaaaagcattctgagaaactactttgtgatgtgtgcgttcacctcacagacttgaacctttcttctgattgtgcagttttgaaacactctttttgtagaatctgcaagtggatatttggagcgatttgaggcctattgtggaaaaggaaatatcttcacataaaaacaacacagaagcattcctagaaacttctttgtgatgtgtgtcttcaactcacagagatgaacctatcttttgattgagcagtttttcaactctctatttgtaggaactgcaagtggatatttggagccctttgcgctctactgtgtaaaaggaaatatctgcaaatgaaaactacactgaagcattcagagaaacttctttgtgatgagtatattcataacacagattgaaacctacctttgattaagcagttttgaaagactctttttgtagaatctgcaagtggatatttggagagctttgaggcccattgtggaaaagaaaatatcttcacataaaaactgcacagaaacattctgggaaacttctttgtgatgtgtgcattcaactcacagagttgaatctttcttttgattggacagatttgaatctctctttttgtagaatccacacgtggatatttggagccctttgcagcctttggtggaaaaggaactgtcttgaaataaaagctacaccgaagcattctgagaaacttcttttgatgtgttcattcatctcgcacagttaagcctatcttatgattgagcggttttgaaacactctttttgtagaatctgcaagtggatatttggagcgacttgaggcctattgtggaaaaggaaatatcttcacataaaaactacacagaagcattctgagaaacttctttgtgatgtgtacattcatctcatagggttgaaactatcttttgattgagcagtttagaaactcttttttcagaatctgcaagtggttatttggagagctttgaggcctattgtggaaaaggaaataaatgcacataaaaactacgcagaagcattctgagaaacttctttgtgatgtgtgaattccactcagagagttgaacctatcttttgattgagctcttttgaatgtctctttttgtagaatctgcaagtggatgtttggagccctttgcggtctatggtcgaaaaggaaatgttttctaataaaaactacacagaagcattctgagaaatttctatgtgatgtgtgcattcatctcacagggttgaacctatcttatgattgagcagttttgaaacactctttttgtagtatctccaagtggatatttggagcgctttgggggctatggtggaaaaggaaatatcttcacataaaacccacacagaagcatctgagaaacttctttgttatgtgtgcattcaactcagagagttgaacctgtcttttgattgagcagtttttgaacatctctttttgcaaaatctgcagctggatatttggagcgctttgaggcctactctggaaaagcaaatatcttcacataaaaacaacacagaagcattcttagaaacttctttgtgagatgtgcattcaactcacagagtcgaacctatgttttgattgagcattttcaatctctcttttttagaatctgcaagtggatatttggagcacttttaggcctattgtggaaaaggaaatatcttcacagaaaaaactacatagaaccattccgagaaacttctttgtgatgtgtgccgtcaactcgcagagttgaacctatcttttgattgagcagtttttaaactctctttttgtagaatctgcaagtggatatttggagcctttgtgctctatggtgtaaaaggaaatatcttcaaataaaaactacacagaagcattcagagaaacttctttgtgatgagtgcatttatcacagagagttgaaaacctcctttgactgagcagttttgaaacacccgttttgcagaatctgcaattggatattgggagagatttgaggcccattgtggaaaaggaaatatcttcacatgaaaactacacaaaaccattctgggaaacttctttgttatgtgtgcattcaactcacagatttaagcttatcttttgattgagcagttacgtatctctcttttggagaatctgcaagtggatatttggagtgctttgaagcctactgtggaaaagcaaatatcttcaaataaaaaatacacagaagcattctgaggaacttgtttgtgaggtaggcattcaaatcgcagagtagaagctattttttgattgagcagtttcgaatctctctttttgcagactctacaagtggatattcatagagctttgagacgaattgtggaaaaggaaatatcttcacataaaaactacacagaagcattctgggaaacttcttcgtgatgtgtgcattcaactcacagagttgaatctatcttttgattgggcagatttgaatctctctttttgtataatctgcaagtgaatatttggagccctttgtggcctatggtggaaaaaggaaatatcttcaaataaaaactacagagaagcattctgtgaaacttctttgtgatgtatgcattcatctcgccgggttatacatatcttatgattgagcagttttgaaacactctttttgtagaatctgcaagtggatatttggagcgccttgaggcctattgtggaaaaggaaatatcttcacataaaaactgcacagaagcattctgagaaacttctttgtgatgtgtgcattcatctcacagagttgaaactttcttttgattgagcagttttgaaaccgtctttttgtagaatctgcaagtggatatttggagcgatttgaggcctactgtggaaatggaagtatcttcatataaaaactacacagaagcattgtgagaaactccttcatggtttgtgcattcaacttacagaatggaacctatctaatgattgagcagttttgaatctctctttttgcagaatatgtaactggatatttcgagagctttaaaacctattgaggaaaaggaaatatcttcacataaaaactacacagaagcattctgagagacttctttgtgatgtgtgcattgaactcacagtgttgaacctatcttgtcattgagcagttttgaatctctctttttgtagaatctgcaagtggatatatggagccctttgtggcctatggtggaaaaggaaatatcttcaaataaaaactacacagaagcattctgagaaacttctttgttataagtgcattcatctcacagggttgaacctatattatgattgagcagttttggaacactctttttgtagaatctgcaagtggatatttggagtactttgaggcctgttatggaaaagggaatatcttcacataagtactacacagaaacattctgcgaaatttcttgttatgtgtgcattcaactcacggagttgaacctgtcttttgattcagcagttttgactctgtctttttgtacaatctgcaagtggatatttggagccttttgcgccctatggtggaaaaagaaatatcttcaaaaaaaaaaaaaaaaaactacacagaaccattctggggaaattctttgtgatgagtgcattcatcacaaagagttgaaactttctattgactgagtagttttgaaacactattttgtagaatctagaagtggatatttcaagggcttttaggtctattttggaaaaggaaatatcttcagataaaaacaacacagaagtattacggcaaacttcgttgttatgtgtgcattcaactcacagatttgaacctatcttttgatagagcagttttgaaactctctttgtgtagaatttgcaagtgaatatttggagagttttgtggcctgcggtagaaaatgaaataccctcacataaaatctagacagaagcaatctgagaaacctcttagtgatgtgtgcattcatctcacagagttaacctttcttttgattgagcagttttgaaactctctttttgtagaatctgcaagtggacatttggagcgctttggggcctacggtagaaaaggaaacatcttcacataaattgtagacagaagcaatctgagaaactactttatgatgtgtgcattcctctcacagagttaaaactttcttttgagtgagcagttttgaaactgtctttttgtagaatctgcaagtggatatttggaacattttaaggcctactgtggaaaggaaatatcttcacataaaaagaagaaagaagcaatctgagaaacttctttgtgatgtgtgcattcgtctcacagaattaaacttttcttttgattgaggagttttgaaactctgtttttgtagaatccgcaagtggatatttggagcgctttgaggcgtatggtggaaaaggaaatatcttcacataaaaactagacagaagaattctgagaaactactttttgatgtgttcgttcatttcacatagttgaacctttcttttgactgagcagtttggaaacactctttttgtggaatctgccagtggacatttggagagttttgcggactatggtagaaaaggaaatatcttcacataaaatctagacagaagcaatctgagaaacttctttgagatatgtgtattcatctcacggagttaaactttgcttttgatacagcagttttgaaactctctttttgtagcatctacaagtggacatttggaccagtttgaggcctatgttggaaaaggaaacatcttcacataatatctagacagaagcaatctaagaaactcctttgtgatgtgtgcattcatctcacagagctgaagttttcttttgacggagcagattggaaactctctttttgtagaatttgcaagtggacatttggagcactttgaggcctgctgtggaaaaggaaatatcctcacataaaatgtagacagaagaattctgagaaacttctttgtgatgcggacgttcttctcacagagttgaacattacttttgattgagcaatttggagacactctttttgtagaatctgcaaatggacatttggagcgctttgaggcctatggtagaaaaggaaacatcttcacataaattatagacagaagcaatctgagaaactactttgtgatgtgtgcattcatctcacagagttaaaactttcttttgagtgagcagttttgaaactgtctttttgtagaatctgcaagtggatatttggagcgttttgaggcctgcagtggaaatggaaatatcttcacataaaaactagacagaagaattctgagaaacttctttatgatgtgtgcgttcatcgcagagagttgatcctttcttttgtttgagcagttttaaaactctctctttgtgatatgaagatatttccttttctaccgtaggccgcaaagcgttccaaatgtccacctgcagattttacaaaaagagtgtttccaaactgctcaatcaaaagaaagcttcaactctgtgagatgaatgtacacatcgcagataagtttctcagattgcttctttctcgattttatgtgaagatatttccttttctaccataggcctcaaagagctcaaaatgtccacttgcagattctacaaaaagagtttttccaaacggctcaatcaatagaaaagttcaactctgggagatgaatgtacacatcacaaagaagtttgtcagaattcttctgtctagtttttatgtgaagatatttccttttccaacatagccctcaaagtgctccagatgtccacttgcagattctacaaaaagagagtttcaaaactactcaatgacaacaaagttttaacactgtgagatgaatgcacacatcacaaagaagtttctcagattgcttctgtctagattttatgtgaagatatttcctttcctaccataggctgctaagcgctccaaatctccacttgcagattctacaaaaagagagtttcctaactgctcaatcaaaagaaaggttcatctctgtgagatgaatgcacacatcacaaagaagtttctcagattacttctttctagattttaaatgaagatatttccttttgtaccttaggcagcaaagtgctgcaaatgtccacttgcagacactacaaaaatagtgcttccaaactgctaaatcaaaagaaagtttcaactctgtgagatgaatgcacacatcacaaagaagtttcccagaattcttctgtctagtttttatgtgaagatatttccttttccactaaacgcctcaaggtgctgcaaatgtccacttgcagattctacaaaaacagagtttcgaaactgctctatcaaaggaaacgtttaactctgtgagatgaatgcacacatcacaaagaaggttcccagatttcttctgtctagattttatatgaagatatttccttttctacaataaaccacgaagcgctccaaatgtccatttgcagattttacaaaaagagcgtttccaaactgttcaatcaaaagaaacattgaactctgtgggatgaatgcacacatcacagagaagtttctaagaattcttctgtctagtttttatgagaagatatttccttttccaccattggtctctaagtgctccaaatgtcctcttgtagattctataaaaacagagtttcaaagctgttcaatcaaaagaaaggtttaactctgtgatatgaatgcacacatcacaaagaaatttctcacattacttatgtctagattttatgtgaagatatttccttttctacattaggggtcaaagcaatccaaatgccacttgcagaatctacaaaaagaatctttccaaactggttaatctctcagagatgaatgcatgtataaaaaagaagtttctcagaattcttctgtcaagtttttatgtgaagatatttccatttccaccataggcctcaaagtgctccagatggccacttgcagattctacaaaaagagcgtttcagaactgctcaatcaaaagaaaattttaactgtgtgaggtgaatgcacacatcacaaagaagtttctcagtttgcttctgtctagattttatctgaagatatctccttttctaccataaaccacaaagcgctccaaatgtccacttgcagattctacaaaaagagtgttttcatactgctcaatcaaaagaaagattcaactctgtgagatgaatgcacacatcaaaaagaagtttctcagaattcttctctctagtttttatgtgaagatatttccttttccaccataggcctcaaagcgctccaaatgtccacttgcagattctaaaaaaagaaagtttcaaaactgctcaatcaaaagtaaggtttaactctgtgagatcaatgcacgcatcacaaaacagttcctacgattgcttctgtctagattttatgtgaagatatttccttttctaccttaggccacaaagcactccaaatgtccacttgcagattctacaaaaagagggtttccaaactactcaataaaaagaaagattcaactctgtgagatgaatgcacacatcaaaaagaagtttctcagaattcttctctctagtttttatgtgaagatatttactttcccaatataggcctcaaaacgctcagaatatccacttgcagattctacaaaaagagagtttccaaactcctcaatcaaaagaaagatttaactctgtgagatgaatgcacatttcacaaataagtttctcagattgcttctgtctagattttatgtgaagatatttccttttctactatacgccccaaagcgctctgaatatccacttgccgattctacaaaaagagtgtttccaaactgctcaatgaaaagaaagattcaactctgtgagatgaacgcacgtatcacaaagaagtttctcagaattcttctgtctagttttaatgtgaagataattcctttcccactataggcctaaaaatcctcaaaatgtccactggcagattctacaaaaagagagtttcaaaactcctcaatcaaaagaaagttttaactctgtgggatgaatgtacacgtcataaagaagtttctcagattgcttctgtctagattttatgtgaagatatttccttttgtaactttggccgcaaagtgctccaaatgtccacttgcagattctgcaaaagattggtgccaaaatgctcaatcaaaaggaagtttcaactctgtgagatgaactcaggcatcacaaagaagtttctcataattcttctgtctagtttttatgtgaatatatttcctttcccaccataggccacaaagagctccaaatgttcacttgcagattctacaaaaagagattttatagactgtttaatcaaaacaaaggtttaactctgtgcggtgaatgcacacatcacaaagtagtttctgagattgcttctgtctagattttatttgaagatatttccttttctaacataggccacaaagccttccaatgttcttcttgcagattctacaacagagtatttccaaactgctcaatcaaaagaaacgttccactctgtgagatgaactaacgcatcacaaagaaaggtgaaaactaaggacaatattttaaacaacaaaaaataccaagtatgcattgagattgagagggaaagtgctgggtcccaagagtataacaggcactgagcctagtgtggggcccaggcgtctctggcatggtgacttcctaggtcgttgttgtccctccttgttgctcctgctgtcttcttcggttacatttgcttctctgcatttcctcattttacagtgtgtgggatgcagtcgtctctgaacaggaataggcaactgtgcacctgttacaccgtgcttgatgctctgcattgatgtacactgggcctaggtttccctggtggactgcttgggccgttcttgtcatctggctctgaagtatttgttcacagaagtgcacttgccagatggggaagccagagatctggggtcctctgatgaggccactctcgccctgcttatcttccctgacatacctaacagatgaagctcaggtgcgcgatgcacctcaggccacagtgtggactgttgtaaccaagcgagttatagacgaacgccaccctttgagacaaattgaggagtcctttattagccagcgaccgagaggcagctaacactcaaaattctcttggccccgaggaaggggctggttttgtttttattccgcactctaaataggggaggagggagtttaactgaaacaatttttacggaagcagagctggcaaatagttaaaaaattaattggttataaaagcagttacaaaacaaataaaccattccaggtgcaggggcttaaactatcacaaagagagaaatgcgggggttttgtgtgatattcactgagtgcgtccccaggagctgctggtgcagcttgcctcaatatcttatcagtaagtgcattcctggacgtgcttttagtcaatttacactagttatggccttaagggagggaggtaaagggggctgcacttgaagaaactaaaatagagtctgtccggctctctctccgctaggagagagtcactcaggttaaaacaaggtagggtatcacaggaccatgtacaattcttcaaactccagcttcaaatctctttcttattgctctcttaagacagtatatttagatcagagtaaatgaaagtaatgttattaggagataagattaaaatcgatcccatttgtaaaaagggtaatagattatttgtgaactgtaatacttttttttagtgaagaatcaccttaaatcttggaacctggatacaagataattccttcattctgcaaacgtttagtagcaaagtatatgccaggactgtgctaggtactagggatacatagagtatccccagtatatagtatatatactaggttggatatatagtataagatgccttggagtgtcagatagtttcatataaatggctcatgcagtatatagacagtgtggtaaaaagagaccactgagatgcacaaaggacagacaataaagcgtccttgaatggtacataaacgtgtttggacttttcactcagggctgttgaagttcttgaagctcagttgtctcagagtttcggtgttttcaagccctgctaagcactttctttctagctgatgattggccaccattactgatcatctattggctctgtctgattcaccaatcccaccactgagtatttatgcaaaggaaaagaaatcaatgtatgagaaagataactgtacttgtgtatttgttgcaacactattcacagtagcagagatataaaatcaaactaaatgtccatcaacaaatgattggagaaagaaaatgtagaaaatatacacaatgaaatactattcaggcgtaaaaagcaatagaatcataacttttgaagacacatggatggaactggaggccattgttgtaagtgaagcaagccagacacagagtaaacatcgtattttatcactcataagcgggtgctaaaaggtgtgtagatattgatgtagagaatggaatgataatggagactcagcagggtgaggggatggaagaggtgaatagtgagaaatttcttaatgggtacaatgtgcattattctggtgatggatacctaaaagccctgacttcaccactatgccatccatgcttacagcaaaattgcacttggaacccataaatttatacaaaaaaagtcttagacctctctctcttctctcataagcctcagagctcagtgatccccttggatctcctcagcctgctgagttgtgattttcctacctaaggtgattttgggcagagacaagggagtgtttcaggaagatgttctcaggcgtacgcttctaaagaaacattgtagactcttctactggcctttatctagtcactgctttaagcaaggaataaaacatctgtggctaaaatttgtaaaactgtgtttcccacccacccttcagacctgacagaagagtttttaggattttaagggaacagctttttcgtgacccaaaagggaacagtggtgcaaagaccaatgtcacgtaggtacattttccccatctgtaaaataactttccgatacgattcccacacctggaatcagtacaatgttttgactgaggtattagaaaaacttatgagttcattatcatttgaacatatgagtaatgtaaaatttaggcagaattttatttgaaaggattatttatgcaatttttgattaaatgatttatattgcagttatttcaaacaataaaaatcaggtcattgtgttgtaagctagaaatatttacaataacgcatggtcttgtttatctcacatgatgaattgaagattaaaacaaaataatttatcttagggaattctgtgaccgtttctgtttctctttgctttcataatgacttcaaactcttgtatatatatagagaactcctgacttaagatttttttttttgtctattgtgctatgtttctgtaactttttaagatctagaggaacatacatttagtctcagttggccaactaaatgttatggagtcagcttctgtgttatgtgctgagtattgaaggaaaggtggagacaaggctgctaccctcgcggaatctgctgagaaaacctgatggagtgtggcagcgaacatgctgggagcatcccaggatgccaaaagcgcacacggatggaacacctgccttagaacaggggaggttcagacaaggagaggtatcaggaaaaacaaggaaagtttaaaatgcaggaatagaaacacacttgagaaatccatgaggaatgaaaagagaatggcggagcagcagcagattgtcaaaaaggaaatcaagaaggagcagccaaagaggttgatggagaatcaggagaaagaaggtgacactgaagccaagggaaggaaagtgttacaacatttctgggaaaaaatgacatgctctgtcttaaccttgctgttttatgagccatatagccacattccaggttctgagaagtccagcactaaagatgtttcttttagtttgcttaacccaacatttgccagaataatctgggctcagtgtgagggtgtgtgcatgtatgtgcctgtgtgttctactagtatctcactgaggctagtgctgtatacaacataatttttaaaacactggttttatccatctttatgttcagctgcagcaacatttacaaaggtcaaatttgatcatgtgtcttcattactaaaggaaacaaaacaaactaatgaataaagcccacctggcagtggctcctcactacctgtatgacggagcacacctggcttggtctgggtgccctgtgcttacctggccgtgctgtcttctgcctgttgctttgcctcccctttcctcctggagaaggtagagatgctctgagctttggcccgtctggaacatgtgtccttcccctcatgtggcccatgttttcctgagtccactttaatctcgtttaaggatatagaactttctttaaagcttttggtcaagtctcactctctatgctgtcttcctgctccttctacaatgtacatactttactgatacattaattatgctatatcagccaagggttttacttctatatcattttatatcattatcttttttcttagagtttagttcattcatttattcagtctttccacaatataattgtatgtcatataatttcatatttattttcattggcgtctatatatcttttctgtaaaaatggaggctttctaaatagatcttcattaatgttgaaagaacaaggttttaagtcttggtctcagccaaaaggagttccccacattaccaggagggaaataaacacttgcattgttgcattagatattcttacagagaaagagaaccatgtgtaatggaaaatttctaactttgcctcagggagaccagattgattcactgagaaagtctgaattggtttagaagcatagttcggagttttctagaaggacaaaagttagagtagggcataagaagtaatacccatatcaaaaaaattagaaatatctcaaattaaccacctaacatcacaactgaaagaattagggaagcaagaagaactcaaccacaaagcttatagaagacaagaaataactaaaatcagagctgaattgaaggaaattgagacatgaaaaactgatcaaaagatcacttaatcaaggttttttgaaaaaattaataagatagggcactagctagactaataaagaagaaaagagagaagattcaaataaacaaaattagaaatgatgaagggaatgttaccactgaccccagagaaataaaaataacaaccagcaactactacgagcacctctatacacacaaactagaaatcctagaagagattaataaattcctggacacatatactctctcaagactgaaccaggaagaaattcagtctctgagcagaccaattatgagctccaaaaattgaatccataataaatagcctatcaacccccccaaaaagcccaggacctgataaattaacaaattttaacagatgtacaaagaagaacaagtaccagtcctactgaaactatttcaagaaatagaggaggagagactcttccccaacttgttctacgagaccagaatcatcctgataccaaagcctggcagtgacacaacaaaagaagaaaacttcaggccagtatccttgatgaacatccattcaataatccacaataaaatacttgcaaactgaacctagcaacacatcaaaaggctaattcaccatagtgaagtaagcttcttccctggaatggaaggttggtccatcatgggcaaatcaataaaatgtgattcgtaacataaagaaaactaaagataagaaccacgtgattgtctcaatagatggagaaaaggctttcagtaaaattcaacaaagcttcatgttaaaaattctcaataaatgaggtatcaaaggaatatacctcaaaataataaaggccatctatgacaaattcacagccaacattatactaaatgggcaaaatctggaagcatcctccttgaaacccgcacaagacaaggatgctctctctcaccactcctattcaacatagtattagaagtcccttctggagcaatctgacaagagaaagaaataaagggtatttaaatagaaagagaagtccaactacctctgttggcagacaacataattctctatctaaaccctatagttgtgacccaaaaactccttaagctgataaacaacttccacaaagtttaaggacacaaaatcaatgtacaaaatttgctagcattcctatacaccaagaaaagccaaactaagagccaaatcagagaggcaattttattcacaatttccatgaaaagaataaagtacatacgaatacagctaaccagggaggtgaaaaatctctacaatgaaaattacaaaacactgctcaaagaagtcagagaagacacagataaatgaaaaatcattccgtgttaatggagagaaagaattaatatcatttaaatggttgtactgcccaaggctattcctattaaactaccaatgacatgcttcatggaagtagataaaagctattcaaaaattcatatagaaccaagaaagaacctaagtagccaaggcaatcctaagcaaaaagaacaaagcttgaggcatcacattaccagacttcaaactacactacagcactatagtaagcaaaacagcatggtactagtacaaaaacagacacatacaccagtggaacagaatagagaggttagaagtaagaccacatacctacaactatctaatctttgacaaagctggcaaaaactagcaatggggaaaagattccctattcaataaatggtgctgggataactggctagccatatacagaagagtgaagttggacttcttccttataccatgcacaaaaatcactcaaatggattaaatacttaaatgtaaaacccaaaactataaaagccctggaagataacatagacaataccatcctggacatagaaagaggcaaagatttcatgataaagacatcaaaaacaacaaacacaactattgacaagtgggatctaattaaacttaaaaacttctgctcagcaaaagaaataatcaatagagtgaacagacaacatatagaatgaggaaaaaatatttacaaactaagtatctgacaaagatctaatattcaatataaggaacttaaatttacaagagaaaaacaaaaaaccctattaaaaagtggccaaagccctgacttctgaatggcacttctggacccagccagggactgagggatctcactgccctaaaggaaagaacacaggcctgtctggctttgccaactgctaattgtagagaccaaaagccttgagtgagcataggcagtcgtcagaaagtgcatgcagcaggacttgagcaagacccgtgctgtgctagcttcaggtctgatccagggcatcatagtggtggtggccagtggtgcttgtgtctttcttctcccagctttaggtggcttagaacagagagaaagactctgtatctttgagagaaaataagggtagggaaaaagagtctctggctagtaatccagaaaattctcctgtatcttgttgaaggctgtcagggtggtacttctctgagtctggaagaattacagcattattgggtataaggtgccccataaagcagatatggcttagatcacaacacccaactcttttcaaatatgtgaaaagccttcccaagaaagacagctacatataagctcagacaatgaagactacaatactcaccttttctctctttaaattttattttttaaacctctcatatggtgctgcatgcccaagattttaatgtccagacactgaagaacatctactagcatcaacactgtccaggaaaacatgacctcaccaagtgaactaaataaggtaccagggacaaatcctggagaaaaagagatatgtgatgtttcagacagagaattcaaaatagctgtatttaaaaaaaaaaaaactgaaagaaatttaagataacaaagtaaataaattccaaattttatcagctaaactcaacaaagagattgaaatagttacagcaaataaagctgaaattctgagctgaaaaatgcaattggcatgctgaaaaatgcattaaaccatgtaacagaagaatggatcaagcagaagaaatagtgagcttgaagacaggctctttgaaaatacattgaagagacaaaagaaaaagaataaaaacaacaaatcatgcctacaggatctagaaaatagcctcacaaagacagatctaagagttatttgttttaaagaagatatagagaaagaggcaggggaggatctagaaaatagcctcacaaagacagatctaagagttattggttttaaagaagatgtagagaaagaggcaggggtagaaaaattcattcaaagggataataacacagaactttccaaacctagagaaagatatccatatccacctacaaaaatgttatagaatattaagcagatttaacccaaaaaagactacttcaaagctttcaatagatcttccaaaagtcaaagataaagaaaagttctaaacgaagaaagagaaaaggaacaaataacatactgcggagctccaacacgtctggcagcagactttacagtggaaactctactggccaggagagagaagcaataaatatttaaagtattaaaggaaaaaaagttttaccttagaatagaatatacagtgaaaattttcttcaaataaaaagaagaaatactgactttttcagacaaacaaaagctgaagtattttatgaataccatacctgtcctaaaggaatgctaaagggagtacttcaatcaggaagaaaaggacattaacgagcaataaatgatcacctaaaggtaaaaaaaaaaatcctcactgctaataggatacaaaacaaaacagaatattataacgctatagctgtgtagtgtgcaaactactcttattcaaagtaggaacactaaataatatccaatcaaaagtaataactacaacatttcaagacatagcacaataaaatataaatagaaacaaaaagttacaaagttaagggatgagcacgaccagtcctgagccagccgatgtggtggaagctccagagctcgggagctcgcggaaggactggagcgtgggctgaaaggaggccgccccgagagctggaagcctgggcaggggacggaggcctctggcgccccccagcaacagcagggcggcaccactttggtcctgcgctaggtctggccgccgctgacggcgggacgctctgggaggccggcggtgctcgggtgtagagggagacagctgcctgggggcaccggcgacagcctctgggggtcccggatccgagaccagcggccccggggtggcggtgatgcctggagtcgtgcgcgcgttgctgggccgggctcttggggcagccaggctccgctgctggcgtctaggccacaccaccctgaacgcgcccgctcgcctctgatctgttgaagctaagcagagtggggcctggttagtatttggatgggattccacctggtaatacccggtaccataggcttttggcttcccgctctctccctctttcccccttttgcctccgtgcttcccaaccgcccccgcgactctgctcccccttgaccgcccccgcgccccagccgaagcccaggacctcctcctgaagatccgccactgcagcaccgccaggcagcagcatcctacctcttccgactcgcggcagccccaccaggagcctggctccaacccgggcaggacgggacagaccccgagggcgcaggcacgggttccctgaggtcccgggtgtcttcacactccccggactcccaggcaattctattcattcatccagagacactgtaaccgtccaagccgggggaaggggcgggcaggggcagcgggtcccacataccccagccaagacctccgctccagaacccgtgggctgctttccccaggggaaggagattgtcttcgccagccacgaggaaatccgtccctgtgcacccggtttcccaataccaccgacttcgtgtgaactccagtcctgaggagaggagagagacccaggcctcgccccgtggacaagcttggcaccacggctccctccagacaaaggagaacactctacaaatctcggagcccagggcaacaaggagacagaaagaagcaaacaaaggaaggaccttatgaaatgcacccacaaagcaaccaaccaattcaagaaaataaaacacgtcttagggctccgttggttttcccgggtggggagccctgactccctgttctagcccggcccaagcaccctccaccccacccctgcctgcggaaaggtgccctgtctacctgagcagagcctccctctccaaggctctgttgctgtcactctaccactccctcaccctctccctttctctacttccccttccacctcgcgctctactgtggagctctctcttcccccttctctgtctctcctccccccttctctgtctctcctccccccttctctgtctttcaatcgctgtatctctctctcctggttctatttctccatcgctctctcccttgctctccttctgtagcaggaggagctgcagacagaacccctcagacaacgagttgtagaaggaggggctttattcagctgggagcatcggcagactcacttctccaaaaacctagctctctgaatgagcaattcctgtccctcttaagggcttacaactctaagggggtccacgtgagaggttcgtgatggattgaggaagcagagggtacgtgactgggggctgcatgcaccggtaattagatcagaacaaaactggacagggattttcacagtgcttttctatacaatgtctgtaatctatagataacataaccgagtaggtcaggggtcaatctttaactagcaggcccagggtgtggcgcagggctgtctgcctgtggatttcatttttgccttttagattttacttcttctttctttggaggcagaaattggccataagacaatatgaggggtggtctcccttcaagctatctgtgtctgtgtctttgtgtgtccgtgtgtgtgtgcccgggtgtggtgtgtctgtgtccgtgtgtgtgtgtgtctgcgcgcgtgcacccgtgtgtatccgtgtgtgtgtcagggtgggtttgctcgtggtagtggtggggtgtgtctgggtgtccgtcagcccctctttcccgggatgaggctgccggggctctagtgctggcgaggggcaaagcagagccttcctgccccattggccatggcaggtccttttcggaacaatcgacgattgtgtaggcgttgtaagaaacatggcctgcggggctgggccggctgttcgccccggtcagcccaggtggctctgggtgtgtggggcaagaggggtccttgcaggaggggcagcaaggaatccaaaataattgttccacggcaaggcggaggaccggaggggaccccaggacagtgggccctgggccctgatgcctcggagcacaccccttcctgagcgggccccaggtgttggaagctctggagctggagagccgggggaaggcctggagtgtcagcgagagggtggccgcctggagagtccagagccctggcagtggatggaggcctctggcgccttggcggtctcgcacgtggtctggccgccggcgacagcgggatgctctgggaggtcagcggaaagagcagcgcggcgactggtggtgcttgggcgtagagggggagagcagtccggccaggggaaagtggctctagggtgcctgatcccagccttgtggccccgggttttgatgacgcctggaatcaggcgggcgtagctggactggactcttgggccagccaggcgccactgccattgtctagggccacaccacccggaaaacgagagagacccaagccgcgaaccgtgggcatgctcagcgccactgctcctgccacagtgaggggcgcactctacaactttcagggcccacagtaccaagaggaaagggaggagccaacaaaggaatgaggctacgaaacgcacccccaaagcaaccaaccaatccaagtaaaaacacgtctcagggctctgttgggtttcccgcgtgggcggccctgcccccctgttccagcccgtcccagacaccttccaccctaccctggccaaaggggcccctgtctaccagatagagcctccctctccaaggctctgttgctctccctctctagctccctcaccctttccctttctctacttccctctccaccttgctctctctctctcaatctcccaggttcctctctgtctctctctggatagctgtttctctctccttccgtttctatctctccatccctctgtcccttgctctccttcaagctgtctgtgtctttctgtgtctgtgtgtgtgcttgtgttcccgcgcgtgcgcccatgtgtgtctgtgtgtttgggagtgggtgtgctaatgattgtggtgggtgagtctggatgtccatcagtaccttagtcctgggatcaggctgtcaactctattgccagtgcatgggtgtcacagttgccgtgatattctcacacacgcaggtgtgtggatctcgttcattttcacatagacaacgagagcgaaaccacagagaaaagaaagatcccgtgcctcacggcctgacgatggattcctgtttcctgcaaaatggggagtctccaatatagcctgtttgaaaacttgaaaggggagcactgacacaatgctggtcttccacgcattcctggaagtttctgggaccccacagagctagggaaacaaacagtcaacatggtcacgctttcagggggcagaaacttgagcaacaggcacctttgcagagggtaaagaaacgtggaatccagaatcacgcttcagttggcctaagtgtggctcctgtgtggatgggactatccgcctcgcgctctgttgcagggctcaacgtggagatatgtcatctgtgaaccatgtggatgaaaaacagacaaccacctgagtctcagctcattgctctctggggaattcgctcattccttcggaaacggaattggtctgaattgctctgggattaagtaacccaggctggcgatccagagggccgctgagcgccccgccagccaacagggctgtgggcccagcacttagcccgcactgggcacccaacattttcccggagtgctgggtcctgttggttctggaggcagaagaccgttttcctctctgccttccgttctctgtttcttgctccttttgtccctcggtccatccttccctctgttcttccttccctcccccggtttttttctccctttctccctccctctttctctcccttccggtgtccctccttccacccatcctttcctagctccatccttccatctcactctctccgttcttgtcctcatctctgcctgcctttcctcttgcctggaaagggcagcacctcggtttgcacggggtctcgggtctacatttagttgcaaggcgctccatggtgctggcaaggaggctgacgggagaagggttggcaagtgatggtgagcgaagaggcagaggagtcgagccgcagaaaagagaactggcctggcttctgccccggcccagtgtttcgcgaactgaggtctccgccaacctgactgaagaacgcggtggaaaaagggatgagagctccgcctgggctagttagaaatcctaggctgctgcctggaaacccgcgcatgcgcagtagacagcccacttccgggtacctggaccggccctgggatccccgggatgctcaggaattctttattgtcattcttgacagcagtcctctgtatggagtctatcgctggacctggaactcagggatcctaggcaggtcagctggaagggaagacacgcctctccataccaagcctgaggttcaccgcgaaagagaggccgccgctctgcccccagcccgccccaaccccgccccaacctgctcctccagcagagtccagtgttcgttctggctgaggagtggttccagcaaaacgggctcttccacgtccttcagctcccccagtggcgccagatctaggaaatgttgtgccttttgctgaaactctggggtttacaggagctcatctaacaggctggaggtgagtgcagacgagcttcccggctcctggagcggttgggaggcgcctggatggctggcatctgtgcttgacgcggaggcctccggaggtggaggtgccccgtctttgggttcccacgccgccctggcaacctggggctccagcaccaccacggactccggtgggacgtgggtggcacaagcacaccttgcccctgtgactcagcttgagggggcccaaactgaacacgcgcccagcaggccgtcgcgcagcagtttctggtcttcctgtcatttgttggggtgcggaggccaccagggagtctgaggatgggagagccccagttctggaggagccagggcagggaacacaaagccccacatgtccaggcaggttgggagagtccttcttcctgcgcagcctggctgggctggagcagggggatggcccttgctgcctggctcacgaaagccccctgtgggagagccccaggggcgcagggcatgtggggtgtgggaagcgcaattccccatgccctgttgtgggtgaactggatagaggagggaggagggtgacacccaccaggggtgccaattagtaaccacagtgacctcaaagaactcaaatgaaaggaagacttgcacgtctctcacttgaagtccagagctagaaatgatcaagcttagtgaagatgtagaattttcatagctagagagaaatcaacacttggcttcaaaacttcaaaggatgggctgactctctttgaggaccactgcagctggtgactttaagttacagccagtgctcattgaccactctgaaaatctcagggcccttaagaattatgcaaaatctattctttctgtgctctagaaatggaacatcactgtctgggtgacagcacaactgttaatagcatagtttactgaatattttaatcccactattgagacctactgctcagaaaaaaaaaaaagtgattcctttaaaaagattgttgcttggccaggcatagtggctcacacctgtaatccctgcactttgggaggccgaggatcacctgaggtcaggagttcaagaccagcctggccaaaatgatgaaacccaatctctaataaaaatacaaaaaaatagcggggcagggtggtaatacctgtaatttcagctactcgggaggctgaggcagaagaatggcttgaaccctggaggcggcggaggttgcagtgagccaagaccacaccactgcactccagcctgggcaacaaaagcgaaactacgtcaaaaaaaaaaaaaaaaaaaaaaggaaaggaaagaaaaagaaaaaggaaaaaaagattgctgcttattgacaattcacctagctacccagaagcttagatggagatgtacttggaaattaatgttattttcatggctgctaatacaatatttaccttcagcctgtggatcaaggagtggttttgactttcaagtgtttttattaattaataaatgcattttgtaaaggtatagctatcatagatagcgatgtctttgatgaatctggataaactgaattgaaaaccttttggaaaggattcaccattaatcctttcatgatatttgaacctcctcccgtgaatcacaaatgtccttaatagcaatccttaaatgccattaaggacatttgtgattgatgggaggaggttgaaatattaacattaacaggagtttggaagaagttgattccagccctcatggatgactttgagggctcaggatgtcagtggaggaagtccctgcagacgtggtagaaatcgcaagacaactagaattagaattagggccttaaggtgagatgaaattgctgtaaactcatgatgaaacttgaacaaatagggagttgcttcttgtggacgagcaaagaaaatattttcttgagatggaatctaatccaggtggagatgctataaacattgttgaaatgacaacaaaggatttagaatattccataaacctagttgataaagcagcagcagggtttgagagggtttactccaattttgaaagaagttctgctgttgataaaatgctgtcaaacagcatcacatgctacagggaaatcttttgtgaaaggaacaaacttcattgttttaagaaattgacacaggcacccaaccttcggcagcccccacactgattagccagcagtcatcaatatataggcaagaccctcaccagcaaaaagattatgacttggtgaggctcagatattcattagcattttttagcactgatgtattttaacttaaggtatgtacacagttttttagacgtgctattaattactaattaataattattaaatactcattagactacaatatagtttaagcataacttttataagcactgggaaacaaaatgtttatgcaactaacttgattgtaacatttgccttattgcagtagtctggaaccaaacccaccctatctctgaggtgtgcttgtaggtttttggttgtaacatttgccttattgcagtggtctggaaccaaacccacactatctctgaggtgtgcttgtaggtttttggttgtaacatttgctttattgcagttttctggaaccaaacccacaatacctctgagtatgcttgtaggtttttggtggttctttgtttggagatggggtttcgctctgtcacccaggccagagtgcagtggcatgatgatagctcactgcagcctcaaactgctgggtcaagtgatttttctaccacagcctactgagtggctgggactacaggcatgcagcactatgcttggctattttttttaatttttttttgtagagacgggatctcactatgtagcccagctggtcttgaactccgggactgaagcaatccagccacttcagcctccaaaagtgcagccattacaggcttgagccactgcacccagcttgtctgcagttcttaaaacaaaaacggccaggtgccatgtctgacgcctgtaatcccagcactttgggaggccaaggcaggtggatcacaaggtcaggagttcgagaccagcctggccaagatggtgaacccagtctctactaaaaatacaaaaattagcccggcgcagtggtgggcaactgtagtcccagctactcgggaggctgaggcaggataattgcttgaaccctggaggcggaggttgcagtaagccgagatcgtgccactgcactcccgccttgcgacagagcaagattccatcaaaaaaaaaaaaaaaagaacaaacgtaatttaaaagattaaaattaagatagatttttacaaatgtatatatctaccattacagtatcatacagaatggttttactgccgtgaagattctctgtgctctgtgtatcatctcttccttccccttggtccatggcaaccactgatctttctactgttcccatagtttcaccgtttccagaacgtcatataattggaatcgaacagtacgtagacttttcggattggcttcttcttttagcaatatgcatttaagtttcctccatgtatttttttgtggcttgatagatcatctcctgttagcggtgaataatatcccattgccattatacttttgtcaagactcagaaagtacaatgtgaagagtaaataagtatgaatgtgcactgtaaactttgagtgatactgaagggtcaagataggttcctggttgtcacaggtgtgctcctgtgaggcaggaagctgtagtggggaggctgtgtgtggggaaagggacatatgagaagtctgtactctctgctccatttagctgtgaacctgcacttctctaaaaaataaaattagttaaaattaagagcaaaaaattagaaaaattaaaacattacaatgtgtcatatagttttcaaatcacaagatagaaaaatacataataaaagaaactatagaaaacaacaaggataggaataaaaaacatcagtgatagaaggcagaagacagaaacgtggagccaaacacattaatttattttaatcattagttatactcatttatattaatttatattgatttaacatattaattttgactaaatggcattaaaggagttttgaggaatttgcatgtcacattctggatgagagaactcaataatattaactctttagtttgctgtaaatcatttaaaaatatgctcaaattccaataaaaattccaagaaaaatattttcgaagaagaaaatgttattttaaatccacatattgaacacacatgagagccaattttataaaatttactataagatatttaagattgttattagtattcaaaattaaacaaatttgaaatggcacaaaaataaacacattaatgaaagagaatcaaaaacacagaaattgagtgtaattttatctagtaacagggtaataatttaaacccacaaaacagagcgatttttgcatttatgatgttaaaatattgggtaatgatttgagaatataaaatgatagaattgaatcctggtcccacaacttacataaaagttaattccagtattaaatgtaaaaaaaaaaaaaaaaagagagaaaataaaattagatgtacctgtgttttatgaccttgagaatgaatgaatgtcttctaaaatcaaaactgcaaacagaaactatataaaaagggataaacctaacgtacctagaacgtaaattcttacacatttcaacaccaagtaaatagcacaaaacaaactggggaaatttttacaacaattatattagatgaaagttaaaatccttatgacatatacaatgtataaaacagtattattaccactattattaataccattatgattacctggtcttcccacgcaccagtcctcttctggtgccctgtggtgaaacagagcccttcctctctggccacagtgagggatccagcaggaaccctgcctaagccctcagagggtgtgagccaagccaggacatcacattccctcctgcaatgatgcagatacccactcacgacagagatttggtaactctctggaaaagctgtgtaacaattattgcagaaacttgtttcttatgttcccagacacatggagaaagctggtctggaagactgatgtccacatgctaagagaagcagtcactcataacacacactgcacacaccacaccatgtgcacacgcacacacaccccacacacagacaccacataaacagcacacacaccatgtgcacacgtgaaggggtggcctgcccctccacacttgtgggcgtttctcgttgggtgtaacaagagactttagaaaagagacacagacacaaagtatagagaaagaaaaatgggcccaggggaacggcgctcagcatacggaggacccacgccgtcaccagtctctcagttcccttagtatttattgatcattatcggacgtttctcagagagggggatgtggcaggacaatagggtaatagcggagagaaggtcagcaggaaaacatatgaacaaatgtctctgcatcataaacaaggtaaagaaaaaagtgctgtgcttttgacgttcatatacataaatctctcaatgccttaaagagcagtattgttgccagcatgtcccacctccagccctaaggcatttttcccctatctcagtagatgaaatatacaactgggctttacaccaagacattccattgcccagggactagcaggagacagatgccttcctcttatctcaactgcaaagaggccttcctcttttactaatcctccccagcacagaccctttatcggtgtcaggctgggggatggtcaggtctttcccttcccatgagaccatatttcagactattgcatggggagaaaccttggacaatacctggctttcctaggcagaggtccctgtggccttccgcagtgttttgtgtctctgggtacttgagagtagggagtaatgatgactcttaacaagcatgnnnnnnnnnnnnnnnnnnnnnnnnnnnnnnnnnnnnnnnnnnnnnnnnnnnnnnnnnnnnnnnnnnnnnnnnnnnnnnnnnnnnnnnnnnnnnnnnnnnnagaagtttcccagaatacttctgtctagtttttatatgaaggtattgccttttaagccataggctgcaaatcatgccaaatatccacttgcagattctacaaaaagagtgtttcttaactgctcaattaaaacaaaggttcaactttgtgcgatgaatgcgtacattacaaggaagtttcacagaatgcttctgcctagtttttatgtaaagatatttccttttccaccatagtcctcaaaacccttcaaatatccatttacagattctccaaaagaaggtttccaaactgctcaatcaaaagataggttaaacactgtgggatgaatgcacacatcacaaagatgtttctcagaatgcttctatctactttttatgtgaagatattttcttttacaccataggctgcaaatcgctccaaatatccaataccagactctagaaaagtagtgttgcaaactgctcaatcaaaagaaagtttcacctttgtgtaatgaatgcacacatcacaaagaagtttctcagaatgcttctgtctggtttttatgggaagatatttccttttccaccataggccacaaagcgctccaaatatcctcttgcaggttctacaaagagagtgtttcaaaactgctccatcaaaagaaatgtacaactctgtgagatgaacgcacacatcacaaagaagtttctcagaatgatctgtctagtttttatgtgaagatatttccttttccaccaagggcctcaaagtgctgcaaatatgcacttgcagattatacaaaaagagtttttcaaaaatgctcaatcaaaagaaaggttcaactctgtgtgatgaatgcacccatcacaaagaagtttctcagaatgcttctgattagtttttatatgaagatatttccttctactctataggactcaaagcactcctaatatccattttcagatactaccaaaagactgtctccacactgctcaatcaaaagaatagttcaactctgtcatttgaatgcacacatcacaaggaaatttctcagaatgcttctttctagtttttatgtgaagatatttccttttccaccataggcctcaaagccctccaagtatccacttgcaaattctacaaaaaaagagtttcaatacttctcaatcaaaagaaaagttcaactctgtgggatgaatgcccacatcagaaaacagcttctcagaatgcctctgtctagtttttatatgaagatatttccttttccaccataggccacaaagcgctccaaatatccactttcagataccacaaaaagagtgtttccaaactgctcaatcaaaagaaaagttcaactctgtgtgatgaacacacacctcacaaagaagattctcaaaattcttctgtgtagtttttatgtgaagatatttcctttttcaccataggccccaaagtgctccaaatatccaaagcagattcgacaaaaagagtgtttcaaaactgctcattcaaaagaaaggttcaactctgtgagatgaatgcacgcatcacaaagaagtttcccagaatgcttctgtctagtttttattttaagatatttccttttccaccatacgcctcaaagtgctccaattacctattgcaggttctacaaaaagagtatttctaaactgctcaatcaaaagaaaggttccactctgtgagatgaatgtacacctcacaaagaagtttctaagaatgcttctatctagtttttatatgaagatatttccttttccaacataggccccaaagcgtcccaattatccacttgcagattctacaaaaagattgtttcaaaactgctgaattgaaagaaagcttcaactctgtaagatgaatggacatatcacaaagaagttcctcagatgcttctgtctagcttttatgtgaagaatcttccttttccaccatagggtgcaaagcgctccaaatacccacatgcagattctgcaaaaagagtgtttcacaactgctcactgaaaagaaatgttcaactctgtgaaatgaatgcacatatcagaaaggtgtttctcacaatgctactgtctagtttttctgtgaagatatttcctattccaccataggtctcaaatctctccaaatctccatttgcagattctacaaaaagagtgtttgaaaaatgcgaaatcaaaagaggctcaagcctgtgagttgaaagcatgcaccacaaagacgtttctcagaacgcttctgtctagtttttatgtgaaggtatttccttttccaccacatgcaatgtagcactccaaatatccacttgcagattctacaaaaagagtgtttccaaaatgctcaatgaaaagaaatgttcaactgtgtgagttgactgcacacatcacaaataagtttctcagaatgcttctgcctactttttatatgaagatttttccttttccaccctaagctgaaaagcattccaaatatccacttgcagattccacaaaatgagtgtttcaaaaatgctccatcaaaagaaagtttcaactctgtgagttgaatgcacacattacaaataattttctctcagaatgcttctgtctagtttttatatgaagatatttccttttccaccgtaggctgcaaagcactctaaatatacacttgcagattttacaaaaggtgtgtttcaaaactgctcaatcaaaagaacttttcagttctgtgaggtgaatgcacacatcacaaggaagtttctcagaatgcgtctgtctagtttttatgtgaagatatttccttttccaccatagaccccaaagcgaaccaaatatccacatgcagattgtacaaaaagagtgtttaaaaactgctcaatcagaagaaaagttcaactctgtgagttgaatgcacacatcacaaagaagattctcagaatgcttctgtctagtttttatgtgaagatattttcttttccaccataggccccaaagcgctccaaatatccaaagcagattctacaaaaagagtgtttcaaaactgctcaatcaaaagaaaggttcaattctgtgagatgaatgcacacatcacaaagaagtttctcagaattcttctgtctagtttttatgtgaagatatttccttttccaccatacacctcaaaatgcttcaaatattgcagattttacaaaaagagtttttctaaactgctcaatcaaaacaaaggttcaactctgtgaaatgaacacacatatccctaagaagtttcgcagaatgctactgtctagtttttgtgtaaagatatttcctattccaccataggcctcaagtcactccaaatctccacttgcagattctacaaaaagagtgtttgaaaactgctaaatcaaaagaggctcaagcctgtgagttgaaagcatgcatcacaaggaactttctcagaatgtttctgtctagtttttatgttaagatatttccttttccaccataggccacgtagcgctccaaatatccacttgcagattatacaaaaagagtgtctcaaagctgctctatcaaaagaaaggttcaactttgttagttgaatacacacatcacaaagaagtttctcaaaatgcttctgtctagtttttatgtgaaaatatttccttttccaccataggccttaagcactccaaatatccacttgcagattgtacaaaaagagtgtctcaaaactgttcatttaaaagaaatgttcacctctgtgagatgaatgcacacatcacaaagaagtttctcagaatgcttctgtatagtttttatgtgaagatatttccttttccactggtggacgcaaagctctccaaatacccacttgcagattctacaaaaagactgtatcgaaacttttcaaccaaaaggaaggttcaactctgtgtgtcaggcagacaccacaaagaagtttctcagaatgcttctgtctagatttatgtgaagatacttccttttccaccatagggctcaaagcacaccaaatatccacttgcagattctacaaaaatagtgtttcaaaactgctcaatcaaaagaaaggttcaactctgtaagatgaattcacacataacaatgtagttcctaagaatgcttctgtctactttttacatgaaaatatttcgttatccaccataggcctcaaaacgctccaaatgtcaacttgcagattctacaaaaagcgtgtttcaaagcttctcaatcaaaagaaagttttaactctgtgagatgattgcacatgtcacaaagaagtttgtcagaatgcttctgtttagtttttatgtgaagatatttccttttccaccataagcctcaaagcgctccaaatgtccacttgtagattctacaaaaagagtgttttaaaactgctcaatcaaaagaaatgttcaacacggtaagatgaaggcacatatcacaaagaagtttgtcagaatgtttctgtccagttttgaaacaccctttttatagaatctgcaagtggacatttggagcgctatgaggcctatcgcggaaaaggaaatgtcttcacatgaaaactagacagaagcattctgacaaacttctttgtgatgtctgcattcatctcacagagttgaacctcacttttcattgagcagttttggaacactctttttgttgaatctgcaagtggacatttggagcgctatgaggcctatcgcagaaaagaaaatgtcttcacatgaaaactagacagaatcattctgagaaaatactttgtgatgtgtgcattcatctcacagagttgaacctcacttttcattcagcagttttgaaacactctttttgtagaatctgcaataggacatttggagcgctatgaggcctatcgcggaaaaggaaatgtcttcacatgaaaactagacagaagcattctgacaaacttctttgtgatgtgtgcattcatctcacagagttgaacctttcttttgattgagcagctttgaaatactctttttgtagaatctgcaagtggacatttggagtgctttgaggcctacggtggaaaaggaaatatcttcacataaaaactagacagaaggattctaacaaacttctttgtgatgtgtgcattcatctcacagagttgaacctttttttgtttgagcacctatgaaatactctttttgtacagtctgcaattggacatttggagtgcattgaggcctatggtggaaaaggaaatatcttcccataataactagacagaagcattctgacaaacttctttatgatgtgtgcatttatctcacagagttgaaccttacttttcattgggcagttttgaaacactccttttctagtataggcaagtggactcttggagcgctttgaggcctattgtggaaaggaaataccttcacataaaaactagacagaagcattctgacaaacttctttgtgatgtgtgccttcatctcacagggttgaagcttccttttgattgagcagcttttaaaccctctttttgtagaatctgcaagtggacatttggagcgcgttgagaactatggtggaaaaggaaatatcttcacataaaaactagaaagaagcattctgacaaacttctttgtgatgtgtgcattcatctcacagtgttgaaacttgctttcgattgagcagttttgaaacactctttttgaagtatctgcaagtggacatttggagcgttttgaggcccatggtgggaaattaaatatcttcacataaaaaccagacagatgcattctgacaattttctttgtgatatgtgcattgatctcacagagttgaaccttacttttcattgagcagttttgaaacactctttttgtagaatctgcaattggatatttagagcactttgaggtttatgatggaaaaggaaatatcttcgcataaaaacgagacagaagcattctgacaaacttcttttgatgtgtgcattcatctcacagagatgaaactttcttttgattgagcagctttgaaactttctttttgtagaagctgcaagtggacaatttgagcgctttgaggcttatggtggaaatggaaatatcctcacataaaaactagacataagcattcagaaaaacttttttgtgatgtgtgcattcatctcaaagtgctgaaccttactttcgatggagaagttttgaaacactctttttgtagaatttgcaagtggacattggagagctttgaggcctatgggtggacaacaaaatatcttcatacaataactagacagaagcattatgagaaacttctttgtgatgtgtgcattcatctcacacagagttgaacctttctttggaatgagcagctttgaaacactctttttgtagaatctgcaagtggacatgtggagcactttgaggcccatcgtggaaaaggaaatatcttcatataaaaactagacagaagctttctgacaaacttctttgtgatgtgtgcattcagctcacaaagttgaacatttcttttcatggaacagcttggaaacattctttttgttgaatctgcaagtggacatttggagcgatttgtggcctattgtggaaaaggacatatcatcaaataaaaaccagaaatacacattctgacaaacttctttgtgatgtgtgcattcatctcacagagttgaatctttcttttcattgagcagctttgaaacactctttttgtagaatctgcaagtggacatttgcagcgctttggggccaaaagtggaaaaggaagtatcttcacttaaaaactagacagaagccttctgacaaacttctttgtgatgtgggcattcacctcacagatttgaaccttgcttttcattaagcagctttgaaacactctttttgtagaatctgcaagtggacatttggagcactttgcggccaatgctggaaagcgaaatatcttcacaaaaaactagacagaagcactgacaaacttctttgttatgtgtgcattcatctcacagagttgaacctttcttttgattgagcagctttgaaacactctttttgtagaatctgtaagtgcacattcggagcgctttgaggtctatggttgaaaaggaaacatcttcacataaaaactagacagcagcattctgacaacaaacattgtgatgtgtgcattcatctcacagagtagaaacttactttcattaagcagttttgaaacactctttttctagaatctgcaagtggacttttggagccctttgaggcctatattggaaaaggaaatatcttcacataaacactagacagaagcattctgacaaacttctttgtgatgtgtgcattcttctcacagagttgaactttcttctgactgagcagctttgaaacactctttttgtagaatctgtaaatggacatttgcagtgctttgaggtctgtggtggaaaaggaaatatcttcacataaaaactatacagaagcattctgacaaactactttgtgatgtgtgcattcatctaacacagttgaactttcttctgactgagcagctttgaaacactctttttgtagaatctgcaagtggacattttgagcacttgagtccaatcctggaaaaagaaatatcttcatataaaaagtaggcagaatcattctgacaatcttctctgtgatgtctgcattcatctcacaaaatagaaactttctttttattgagcagctttcaaacactatttatgtacaatccgtaagtggacatttggagccctttgaggcccatgatggaaaaggaaataccttcacataaaaactaggcagacgtattctgaccaacttctttgtgatgtgtgcattcttctcacagagttgaaccttacttttgattgagcagttttgaaacactctttttgtagaatctgcaagtggatattttgagtgctttgaggccaatggtggaaaaggaaacatcttcacataaaacctacacagaagcattctgacaaactactttttgatgtgtgcattcatctcacagagctaaacatttcgtttgattgagcagctttgaaacactctttttgtagaatctgcaaggggacatttggagcgctttgaggccaatgttttaagagaaaatatctacacataaaagctagacagaagctttctgaaaaacttctttttgatgggtgcattcatctcagagttgaacctctcttttgattgaggagctttgaaacactctttttgtacaatctgcaaggaccatttggagcgctttgacggctatggtggaaaaggactatcttcacttaaaaactagacagaagcattatgacaaacttctttttgatatgtgcattcatatcacagagttgaactttcttttcattgagcagttttcaaacactccttgtgtagaatctgcaagtggacatttggagccctttggggcctatggtggaaaaggaaatattttcacataaaaactagacagaagcattctgagaaacttctttttgatgtgtgcattcatgtcacagagttgagcattacttttgattgagcagtttggaaaatttctctttgtaggatctgcaagtggacatttagagtactttgagccctatgatagagaaggaaatatgttcacacaactagacagaagcattctgacaaccttccttgtgatatgtgtgttcatctcacagacttgaacgttacttttcattgggcagttttgaaatccccgttttatggaatctgcaagtagacatttagagcactttgagatctgttgtggaaaaggaaatatcctcacataaaaactagacagaagcattctgacaaactaatttgtgatgtgtgcattcatctcacagagttgaaccttgcttttcattgagcagttttgaaacactctttttgtagaatctgcaaggggacatttgttgtgcatcgaggcctatgctggaaaaggaaatattttcatgtaaaaacaagacagaagcattctcacaaacatctttttgatttgtgcattcatatcacacagttgaacatttctttggattgagcagtttgggaacactctttttgtagaatctgcaagtggacatttggagcgttttaagccctatgtcagaaaaggaaatatcttcacatagctagacagaagcatctgacaaccttctttgtgatgtgtgcgttcatctaacagagatgaaacttatttttcattgagaagttttgaaacacacattttgtagaatctgcaagtggacattgggagcattttgagaccaattgtggaaaaggaaaatcttcatataaaaactagacagaagcattctgttaaacttctttgtgatgtgtggattcgtctcacagagtggaagcttacttttcactgagcagttttggaacactctttttgtggaatctgcatagggacatttagtgctctttgaggcctatggtggaaaaggaaataccttcacataaacactggacagaagcattctgacaaacttcttggtgatgggtgcattcagctcacaggttgaaactttcttttgattgagcagctttttttttttttttagaatcggcaagtggatatttggagtggtttggggtctatggtggaaaaggaaatatcttcacataaaaactggacagaagcattctcacaaactggcttgtgacgtgtgcattcatctcacagagttgaaactttcttttgattgagcagatttgaaacactctttttgtagagtctgcaagtggacatttggagcactttgaggcctacagtggaaaaggaaatatcttcacataaaaattagacagaagtattctgagaaacttatttgtgatgtgtgcattcatctcacagagttgaaccttacttttcattgaacagttttgaaacactctttttgtagaatctgcaagtagacatttggagagctttgaggcctatgggtggacaacgaaatatcttcatataataactagacagaagcattatgagaaacttctttgtaatgtgtgcattcatctcacacagagttgaacatttcttttgatttagcagctttaaaatactctttttgtagaatctgccattggacatttgcggcgcttgaggccaatggtggaaaaggagatatcttcacatagaaagtagatagagccattcttacaaacttctttgtgatgtgtgcattcatctcacagtattgaacctttcttttgattgagcagctttaaaacactctttttgtagaatctgcaggtggacatttggagcgccttgtggactactgtggaataaggaatatcttcacataaaaactagacaggagcattctgacgaacttcttagtgatgtgtgcattgatcttgcagcattgaacctcccttttgacggagcagttttgaaactgtcttttgtagaatctgcatgtggagattttgagagttttaggcctatgttgcaaaaggaaatatcttcatataaaaactagacagaagcattctgacaaccttctttctgacatgtgcattcatctcacagagttgaactttcctttttatggaccagttttgaaatactctttttgtagaatgtgtaagtggacatttggagagtcttgaggcctatggtggaaaatgaaatatcttcacataaaactagacagaagaattctgagaaacttctttgtgatgtgtgcgttcatctcatagagttgaacctttcttttgattgagcagtttagaaacacaatttttgtagattctgcaagtggacatttggagtgctttgcggcctgtggtagaaaaggaaatatcctcacataaaacctagacagaagcaatgtgagacacttctttgtgatttgtgcattcatctcacagaattaaacatttcttttgattgagcagttttgaaacactccttttgtagaatctgcaagtggacatttggagggctttgaggcctatggtagaaaaggaaatatcttcacataaaatctagacagaagcaatctgagaaacttctttgtgatgtatgcattcatctcacagagttaaacctttctttgattgagcagttttgaaactttttatagaatctgcaagaggacatttggagcgctttgaggcctgtagtgaaaaaggaaatatcttcacaaaaaactagacagaggaattctgagaaacttcttcatgatgtgtgagttcatctgacagagttgaacctttcttttgattgagcagtttggaaacacaatttttgtagattctgcaagtggacatttggagcactttgcagcctgtggtagaaaaggaaatatcttcacataaaacctagacagaagcaatgtgagaaacttctttgtgatgtgtgcattcatctcacagaggtaaccctttctttcaatagagcagttttgaaatgctctttttgtagaatctgcaagtggacatttggagcgcatttagtcctgtggtggaaaagaaactatcttcacataagtactagacagaagaattctgagaaacttctttgtgatgtgtgcattcatctcacagagctgaaactttcttttgattgagcagtttggaaacactctttttgtggtatctgcaagtggtctttggagtgctttgcggcctatgatagaaaaggaaataacttcacataaaatctagacagaagcaatctgagaaacttctttgtgatgtgtgcattcataccacagagttaaaactttcttttgattgaggagttttgaaactccctttttgtagaatctgctagtggacatttggagggctttgaggcctattgtggaaaaggaaatatcttcacataaaagctagacagaagaattctgagaaacttctttgtaatgtgtacgttcttctcacagagttgaatctttcttttgattgagcagtttggaaactctctttttgtagaatctgcaagtggacatttggagctctttgaggtctatggtggaaaaggaaatatcttcacttaaaaactagatagaagcattctgagaaactgctttgtgatgcgcgcattcatctcccagagttgaacgtttctttttatggaccagttttgaaatactctttttgtataatctgcaaatggacatttcgagcgctttgcgtcctatggtgaaaaaggaaatatcttcacttaaaatctagacagaagcaatctgagaaacttctttttgatgtgtgcgttcatctcacagagttaaagctttcttttgattgaacagttttgaaaatctctttttgtagtatctgtaagtggacatttggagtgctttgaggccaatggtagaaaaggaaataacttcacataaaaactagacagaagaattctgagaaacttctttgtgatgtgtccattcatctcacagagttgaacctttcttttgtttgagcagtatggaaacacccttttgatggaatctgcaggttgacatttggcgtcctttgaggcctatggttgaaaaggaaatatcctcacataaaatccagacagaagcaatctgggaaccttctttgtgatgtgtgcattcatctcccagagttaaaactttcttttgattgagcagttttgaaactgtctttttgttaaatcttcaagtgaacatttggagcgcatttattcctgtggtggaaaagaaaatatattcacataaaaactagacagaagaattctgggaaacttctttgagaagtgtgcattcatctcacagagttgaagctttcttttgattgagcagtttggaaacactctttttgtaggatctgcaagtgggcatttggagtgctttgcggcctacgatagaaaaggaaatatcttcgcataaaatctggagagaagcaatctgaaaaacttctttgtgatgtgtgccttcatcccacagaattaaacctttcttttgattgagtagttttgaaactcactttttgtggaatctgctagtggacgtttggaaagctttgaggcctatggtggaaaaggaaatatcttcacataaaaagtagacagaagaattctgagaaacttctttgttatatgggcattcatttcacagagttgaacctttcttttgattgagcagtttggaaacactctgtttgtagaatctgcaagtggacatttggagcgctttgtggtctatggtagaaaaggtaatatctttacataaaatctagagaaaagcaaactgagaaactactttctgatgtgtgcattcatctcacagtgttaaacctttcttttgattgaggagttttatagctctctttttgtagaatctgcaagtggacatttggagcgctttggggcctatcgtggagaaggaaatatcttcacataaaaactagacagaaggattttgagaaccttctttgtgatgcgtgggttcatctcacagaggtctatggtagaaaaggaaatatcttcacttaaaatctagacataagcaattgagaaacttctttttgatgtgtgcactcatctcacagagttaaacctttcttttgattgagcagtttttaaactctctttttgtagaatgtgcaagtggacatttgaggtgctttgtggcctatggtagaaaagaaaatatcttcacataatatctagacagaagcaatctgagaaacttctttgtaatctgtgcattcttctcacagagttaagcctttcttttgattgaggagttttgtaactctctttttgtagaatgtgcaagtggacatttgtgccactttgaggcctatggtggaaaaggaaatatctccacataaaaactagaaagaagaattctgagaaacttctatccaatgtgtgcattcatctcacagagttgaacttttcttttgatagagcagttttgaaacactcattttgtagaatctgcaagtgggtatttggagccctctgaggcctattgtggaaaaggaaatatcttcacataaaaactagagagaagcatttttagaaactactttgtgatgtgtccattcatctcatggagttgaaactttcttttgattgagcagtttggtaacagtatttttgtagcatctgcaaaggtatatttgtgatccctttatggtctatggttaaataggaaatatcttcacataaaaactagagagaagcattcttagaaactactttgtgatgcgtccattcatctcgtggagttgaaattttcttttgattgagcagtttggtaacagtatttttgtagcatctgcaaatgtataattgtgatccctttatggcctatgtttaaataggaaatatcttcacataaaaactaaacagtagctttctgagaagcttctctgtgatatgtgatttcatctcacagagttgaacatttccttcaattgagcagattggaaacagtctttttgtacaacctgcaaatggatatttggtgctctttgaggcctatggtgaaaaaggaaatatcttcacataaaaattagatggaagcattctgaaaaacttctttgtgaagtttgcattcatctcacacagttgaacatttctttgattggagatttggaaacagtctttatgtaaagtctacaaaggtataattgtgaacccttttaggcctatggtgaagtaggaaatatcttcatataaaaactacacagaaacattctgagaaagtttcttgtgatgggtgcattcatctcacagagttgaagctttcttttgctagagcagtttggaaacactcctttgtagaatccccaaagggataattctgagtccattgaggcctttagtgatgtaggaaatatcttcacataaaagctagacagaagctttctgagaaacttcttttaaatgagtgctttcatctcaaagagttgagcatttattttgactgagcagtttggaaacactctttttgcagaatctgcaaatggataattggagcgcattgaggcctatggtgaaaaagcaaatatcttcacataaaaactaaacagaagctttctgaggaactactttgtaatgcgtgcattcatctcacagagtttaacctttcttttgattgagcagttttgatactctctttttgtggaaactgcaagtggacatttggagtgctttgacttctatggtggaaaaggaaatatcttcacattaaaacgagagagaagcattctgagaaacttctttttgatgtgtgcattcacctcacagagttatatctttcttttggttgagcagttttgaaactctgtttttgtagagtctgcaagtggacattttgagcgctttgaggcctatgttggaaaaggaaatatcttcacataaaaactagacagaaagattctgagaaatttctttgtgatgtgtgcattcatctcacagagttgaacctttcttttgattgagcagtttgcaaacactctttttgtagaatctgcaagtggatattcggagcactttgtggactatggtagaaaagggaatatcttcacataaaatctagacaaaagaaatctgagaaacttctttgtgatgtgtgcattcatctcacagagttaaacctttcttttgattgagcagtattgaaacccactttttgtagaatgtgcaagtggacaattggagcactttgatatctatggttgcaaagggaatatcttcacataaaaacgagatagaagtattctgagaaactacaatttgatgtgtgcattcatctcccagagttgaacatttcttttgaaggaccagttttgacatatgctttctgtagaatgtgccattgaacatttagagcaccttgaggcctatggtggaaaaggaaatatcttcacataaaaactagacagaatatttctttttttatttttttattatttttttatttttttattattatactttaagttttagggtacatgtgcacaatgggcaggttatttacatatgtatacatgtgccatgctggtgcgctgcacccactaactcatcatctagcattagttatatctcccaatgctatccctcccccctcatcccacaacaggccccagtgtgtgatgttccccttcctgtgtccatgtgttctcattgttcaattcccacctatgagtgagaatacgtggtgtttagttttttgatcttgcgatagtttactgagaatgatgattttcaatttcatccatgtccctacaaaggacatgaactcatcattttttatggctgcttaatattccatggtgtatatgtaccacatgttttaatccagtctatcattgttggacatttgtgttggttccaagtctttgctactgtgaataatgccacaaaaaacatacatgtgcatgtgtctttatagcagcatgatttatagtcctttgagtatatacccagtaatgggatggctgggtcaaatggtatttctagttctagatccctgaggaatcgccacactgacttccacaatggttgaactagtttacagtcccatcaacagtgtaaaagtgttcctatttctccacatcctctacagcacctgttgtttccttactttttaatgattgccattctaactggtgtgagacggtatctcattgtggttttgatttgcattgctccgatggcccatgatggtgagcactttttcatgtgttttttggctgcataaatgtcttcttttgagaagtgtctgttcatgtccttcacccactttttgatggggttgtttgtttttttcttgtaaatttgtttgagttcattgtagattctggatattagccctttgtcagatgagtaggttgcgaaaattttctcccattttgtaggttgcctgttcactctgatggtagtttcttttgctgtgcagaagctctttagtttaattagatcccatttgtcaattttgtcttttgttgccattgtttttggtgttttagacatgaagtccttgcccatgcctatgtcctgaatggtaatgcctaggttttcttctagggtttttatggttttaggtctaacatttaagtctttaatccatcttgaattgatttttgtataaggtgtaaggaagggatccagtttcagctttctacatttggccagccagttttcccagcagcatttattaaatagggaatcttttccccattgcttgtttttctcaggtttgtcaaagatcagatagttgtagatatgcggcattatttctgagggctctgttctgttccattgatctatatctctgttttggtatcagtaccatgctgttttggttactgtagcattgtagtatagtttgaagtcaggtaatgtgatgcctccagctttgttcttttggcttaggattgacttggcaatgcgggctcttttttggttccatatgaactttaaagtagttttttccaattctgtgaagaaagtgattggtagcttgatggggatggcattgaatctgtaaattaccttgggcagtatggccattttcacgatattgattcttcctacccatgagcatggaatgttctgccatttgtttgtatcctcttttatttccttgagcgatgatttgtagttctccttgaagaggtccttcacatcccttgtaagttggattcctaggtattttattctatttgaagcaattgtgaacgggaggtcactcatgatttggctctctgtttgtctgtttttgttgtataagaatgcttgtgatttttgtacattgattttgtatcctgagactttgctgaagttgcttatcgcttaaggagattttgggctgagacaatggggttttctagatatacaatcatgtcgtctgcaaaaagggacaatttgacttcctcttttcctaattgcatacaatttatttccttctcctacctaattgccctggccagaacttccaaccctatgttgaataggagtggtgagagagtgcatccctctcttgtgccagttttcaaagggaatgcttccagtttttgcccattcagtatgatattggctgtgggtttgtcatagatagctcttattattttgaaatacgtcccatcaatacctaatttattgagagtttttagcatgaagggttgttgaatttgtcaaaggccttttctgcatctattgtgataatcatgtggttttgatctttggttctgtttatatgctggattacatttattgatttacctatatggaaccagccttgcatcccatgggtgaagcccacttgatcatgttggataagctttttgatgtgctgctggattcagtttgccagtattttattgaggatttttgcatcaatgttcatcaaggttattggtctaaaattctcttttttggttggagacagaaaatttctgagaaacctctttgtggtctgtgcgttcatctcacagagttgaaactttcttttcattgagcagtttgaaaacactctttttgtagaatatgtaagtggacatttggagtgctttgcggcccatggtagaaaaggaaatatcttgacataaaatctagagagaagcaatctgagaaactcctttgtgatgtgtgctttcatctcccagagttaaacctttcttttgattgagcagttttgaaactctctttttgtaggatctgcaattggacatttcgagtgccttgaggcttatggtggaaaaggaaatatcttcacatgaaaactagaaagaagaatcctgagaaacttctttgtgatgtgtgggttcatctcagagaggtgaacctttcttttgattgagcagtttggaaacactctttttgtagtatctgcaagtggacatatgcagcgctttgtggcctatggtagaaaatgaaggatcttcacataaaatctaggcagaagcaatctgagaaacttctttgtgatgtgtacattcatctcacagagttaaactttcttttcattgagcagttttgaaaatttctttgtgtagaatctgcaagtagacatttggagcgttctgaggcctacagtggaaaatgaaatatcttaacataaaaactagaaggaagaattctgggaaacttctttgtgatgcgtgcattaatctcacagagttgaacattccttttgatatagcagtttgtaaagactctttttctacaatctgcaagtgtacatttggagcgctttgcagcctatggtagaaaaggaaatatctttacataaaatctagaaagaagcaatctgagaaacttctttgtgatgtgtgcattcatctcacagagttaaaactgtcttttgattgagcagtttttaaactctctttttgtggaatctgcaagtggacatttatagcgctttgaggcctatggtggaaatggaaatatcttcacataaaaactagacagaagaattctgataaacttctttgtgatatgcgggttcatttcacagagttgaatctttcatttgattgagcactttggaaatactctttttatacaatctgcaagtggacatttggagctctttgcggcctatggtagaaaaggaaatttcttcacataaaacctagacagaagctatcagagaaacttctttgtgatgtgtgctttcatctcacagaattaaacctttcctttgattgagcagtttttaatctctcattttgtagaatgtgaagtggacatttggaatgctttgaggactacagtcaaaaggaaatatcttcaaataaaaactagacagaagaattctgagaaacttctttgtgatgtgtgtcttcatctcacagagttgaaattttcttttgattgagcagtatgggaacacttttttgtaaaatctgtaagtggacatttggaccgctttacggcctatggtagaaaaggaaatatcttcagataaaatctagacagaaacaatctgagaaacttcttcgtgaagtgtttattcatctcacagagttaaacctttcttttgagagagcagttttgaaactctgtttttgtagaatctgcaagtggacatttggagcgctttgaggcctatggtggaaaaagaaatatcttcacataaaaactagacagaagaattctaagaaactcctttgtgatgtgtacgttcatctcacagagttgaacctttcttttgattgagcagtttggaaacactgtttttgtagaatctgcaattggacatttggggtgctgtgtggcctaggggagaatagtaaatatcttcacataaaatctagacagaagcaatatgaaaaaattctttgtgatgtgtgcaatcatctcaccgagttaaacctgtgttttgattgagcagttttgaaactcactttttgtagaatccgcaagtggacaattggagtgctttgcggcctatgttaaaaaaggaaatatcttcatataaaatctagatagaagcaatctgagaaacttctttgttaagtgtgcattaatctcacagaattaaacctttcttgtgattgagcagtcttgaaactctctgtttgtagaatctgcgagtggacatttggagcgcttggaggtatatggtagaaaaggaaatatcttcatataaaaactagacagaggaatttggaaaaacttctctgtgatgcttgtgttcctctcacagagttgaacttttcttttgattaagcagtttggaaacactctttttgtagaatctgcaagtggacatttggagggctttgcagcctttggtagaaaaggaaatatattcacataaaaactagacagaagcattctgagaaacttctttgttatgtgtgcattcatctcccagtgttagacctttctttcgatggaccagttttgaaatacaccttttgtgggatctgcaagtggacatttcgagtgccttgaggcctatgctggaaatggaaatatcttcacataaaaactagacagaagaattctgaaaaacttcattgtaatgtgtgcgatcatctcacagagttaacattttcgtttgattgagcagttctgaaactctctttttgaagattctgcaaatagacatttggagagctttgcggcctgtggtagaaaatgaaatatcttcacataaagtctagacagaagtaatctgagaaacttctttctgatgtgtgcattcatctaacggagttaaacctttctttttattgagcaattttgaaactctctttttgtagaatctgcaactggatattgggagcgatttgaggcctatggtgaaaaaggaaatatcttcacataaaaacaggacagaagaattcagagaaacttctttgtgatgcttgcgttcatctcacagagttgaacctttcttttcatgagcagttttgaaaatctctttttgtagaatatgcaagtggacatttggagcgctttgaggggtatattaaaaaaggtaatatcttcacataaacactagacagaagaattctgagaaacttctttgtgatgcgtgcattcatctcacagagttgaacctttcttttgattgagcagtttggaaacactctttttgtagaatatgaaagtggacatttggagcgctttgcgttccatagcagaaaaggaaatatattcacataaaatctagacagaagcaatctgagaaacttctttgtgatgtgtgtattcctctcacagagttaaacctttcttttgatagaggagttttcaaactctctttttgtagaatctgcaagtggacttttggagcactttgaggcctctgttggaaaaggaaatatcttcacataaaaacaagagagaagaattctgagaaacttcgttgtgatacgtgcgttcatctcacagagttgaacccttcttttgatagagcagaatggaaacactctttttgtagagtctgcaaatggacgttgggagcgcttttcggccaatggcagaaaaggaaatatcttcacaaaaaatctagaccgaagaagtctgagaaacttctttgtgatgtgtgcatttatctcacagagttaaacctttcttttgattgaggagttttgaaactgtctttttgtagaatctgcaagtggacatttggagcgctttgaggcctgtggtggaaaaggaaataacttcacataaaaattagagagaagcattctgagaaacttctttctgatgtatgcattcatctccctgagttgaacctttccttgaaggaccagttttgaaatactctttttgtagaatcttcaagtggatatttggagcattttgaggtctgtggtggaaaaggaaatatcctcacataaaaactaggcagaaaaattctgagaaacttcttggtgatgggtgcgttcatctcacagagatgaacttttcttttgatggagcagattggaaacaatctttttggagaatcagcaaaaggatatttggagcgctttgcagcctatggcagaaaaggaaatatcttcacataaaatctagacagaagcaatattagaaacttctttgtgatgtgtgcattcatctcacggagttaaaactttcttttgattgagctgttttgaaaatctatttttgtagaatctgcaatgcgacatttggagcgctttgactcctatggtggaaaaggaaatatcttcacataaaaactagatagaagcattctgagaaacttctttcagactggtgcattcatctccctgagttggacctttcttttgaaggaccagtttaaaaatacgctttttgtagaatctgaagtggacattttgagcaccttgaggcctatggtggaaaaggaaatatcttcacataaaaactagacagaagaattctgagaaaactctttgtgatgtgttaatctcacagagttgaaactttcttttgattgagcagttttaaaacactctttttgtagattgtgcaagtgaacatttgtagcactttacggcttatgttagaaggggaactatattctcataaaatctagacagaaacaatctgagaaacttctttgtgatgtgtgcattcatgtgacggagttaaacctttcttttgattgagcagttttgaaactctctttttgtagaatttgcaagtggacatttggagcgctttgaggccaatggcagaaaaggaaatatcttcacataaaaagtaggcagaaaaattctgagaaattctatgtgacgtatccgtttatctctcagagttgaacctttcttttgattgaacagtttggaaacattctttttgtagaatatgcaagtggacatttggagccctttgtggcctatggcagaaaaggaaatatcttcacataaaatctagacagaagccatctgagaaactactttgtgatgtgtgcattcatctcacagagttaaaactttcttctgattgagcagtttttaaactctctttttgtagaatctgcacgtggacttttggggcggttaaaggcttatggtggaaaaggaagtatcttcacgtaaaaactagacagaagaattctgagaaacttctttgtgatgtgtgcattcatctaacagagttgaacctttcttttcattgagcagtttggaaaaactctttttctagaaactgtaagtggacacttggaatgctttggggcctgtggtagaaaaggaattattttcacataaaatctagacaaaagcaatctgagaaacttctttgtgatgtgtgcattcatctcacagagttaaaactttcctttgattgtggcgctttgaaactctctttttgtagaatctgcacgtggacaaatggagccctttgaggcctatggtggaaaaaggaacatcttcacataaaaactagacagaagcattctgagaaacttctttgtgatatttgcattcaactcgcagagtcgaatattcccttacacagagaagttttgaaacattctttttgtagaatctgcaaatgtatatgtagagctctttgaggccttcggtggaaacgggaaattcttcacataaaaactagacagaagcattctcagaaacttctttgtgttgtgtgtattcaactcacagagttgaaattttgctttgattgagcagttttgaaacactctatttgtagaatctgcaagtgaacaattggagcactttgaggcctgtggtggaaaaggaaatatcttcatactaaaattatacagaagcattctcagaaacttctttgtgatgtgtgcattcaattcagagagttaaaccaaccttttgatagagcagttttgaaacactctttttgtagaatctgcagctggatatatggagccctttgaggcctatggtagaaaaggaaatgtcttcatataaaaactagacagaagcattctcagaaattgctttgtgatgtggcattcaagtcacagggttggaccatcctcttcatagagcagttttgaaacagtctttttgtagaatctgcaagtggatatttggagcgtttggaggcctatggtggaaaaggaaatatcttcacatagagagtagaaaaaagtattctcagaaacttctttgttatgtgtccattaaactcagagtgttgaaccttctttttttttttcttcttttttttttattatacattaagttttggggtacatgtgcacattgtgcagcttagttacatatgaatacatgtgacatgctggtgcactgcacccaataactcgtcatctaacattaggtatatctcccaatgctatcccaacaccctcccccgaccccacaacagtccccggagtgtgatattcctcttcctgtgtccatgtgatctcattgttcaattcccacctatgagtgagaatatgcggtgtttggttttttgttcttgcgatagtttactgagaatgatgatttccaatttcatccatgtccctgcaaaggacatgaacttatcattttttacggctgcatagtattccatggtgtatatgtgcggcattattcacaatagcaaagacttggaactaaaccaaatgtctaacaatgatagactggattaagaaaatgtggcacatatgaactttctttttcatagagcagttttgaaacactctttttgtagaatctgcaagtggacatttggagcactttgaggtatatggtagaaaaggaaatatcttcacataaaaactagacagaagcattctcagaaacttctttgtgttgtgtgcattcaactcacagagttgaacttttcctatgattgagcagttttgaaacactctttctgaagaatctgcaagtggatatttggagcgctttgaggcctatgctggaaaaggaaacaccttcacgaaaaaactagagcagaagcattctcagaaacgtctttgggatgtgtgcattcaactcacagagttgaacctttctttgatagagcagttttgaaacactctttttgtagaatctgcagttggatatttggagcgctttgctgcctacggtggaaaaggaaatatccgcacataaaaactagacagcagcattctcagaaacttgtttgtgttgtgtgcattcaactcacagagttgacctttcctttgattgagcagttttgaaaaagtctttttgcagaatctgcaagtggatatttggagcggtttgaggcctatggtgtaaaaggaaatatcttcacataaaaactagacagaagcattctctgaaacttctttgtgatgtgtgaattcaactcacagagttgaacctttcttttgtagagcagttttgaaactctttttgtagaatctgtaagtagatatttggagcgctttgaggcttacggtggaaaaggaaatatcttcacattaaaactagacagaagcattctcagaaacttctttgtgataagtgcattcaactcagagagtcgaacctttctgttgatagagcagttttaaatcactctttttctagaatctgaaagtggatatttggagtgctttgaggcctatggtggaaaagaaaattcctacacaaaaaaactaggcggaagcattctcagaaatatctttgtgatgagtgcattcaactcacagagttgaacatttatgttcatagaggagttttaaaacactctttttcaggaatctgaaagtggatatttggagcgctttgaggcctatggtggaaaaggaaacacctacacaaaaaaaactagagcagaagcattctcagaaacttctttgtgatgtgtgcattcaactcacagagttgaacctttttttttgaaagagcagttttgaaacactatttttgtacaatctgcggttggatatttggagcgctttgatgcctatggtggaaaacgaaatatccgcacataaaatctagacagcagcattctcagaaacttgtttgtgttgtgtgcattcaactcacagagttgaacctttcctttgattgagcagttttgaaaaagtctttttgtagaatctgcaagtggacatttggagcactttgaggtatatggtagaaaaggaaatatcttcacataaaaactagacagaagcattctcagaaacttctttgtgttgtgtgcattcaactcacagagttgaacttttcctatgattgagcagttttgaaacactctttctgaagaatctgcaagtggatatttggagcgctttgaagcctatggtggaaaaggaaacaccttcacaaaaaaactagagcagaagcattctcagaaacgtctttgtgatgtgtgcattcaactcacagagttgaacctttctttgatagagcagttttgaaacactctttttgtagaatctgcagttggatatttggagcgctttgatgcctacggtggaaaaggaaatatccgcacataaaaacaagacagcagcattctcagaaacttgtttgtgttgtgtgcattcaactcacagagttgacctttcctttgattgagcagttttgaaaaagtctttttgcagaatctgcaagtggatatttggagcggtttgaggcctatggtgtaaaaggaaatatcttcacataaaaactagacagaagcattctctgaaacttttttgtgatgtgtgcattcaactcacagagttgaacctttcctttgattgagcagttttgaaaaagtctttttgtagaatccacaagtggatatttggagcagtttgaggcctatggtgtaaaaggaaatatcttcatataaaaactagacagaagcattctcagaaacttctttctgttgtgtgcattcaactcacagagttgagcttttcctatgattgagcagttttgaaacactcttcctggagaatctgcaagtggatatttggagcgctttgaggcctatggtggaaaaggaaacatcttcacaaaaaaactagagcagaagcattctcagaaacgtctttatgatgtgtgcattcaactcacagagttgaaactttctttgatagagcagttttgaaacactcttattgtagaatctgcagttggatattttgagcgctttgatgcctatggtagaaaaggaaatatccgcacataaaatttagacagcagcattctcagaaacttgtttgtgttgtgggcattcaactcacagagttgaccctttcctttgattgagcagtttggaaaaagtctttttgttgaatccgcaagtggatatttggcgctgtttgaggcctttgttgtaaaaggaaatatcttcacataaaaactagacagaagcattctccgaaagttctttgtgttgtgtgcattcaactcacagagttgaacttttcctatgattgagcagttttgaaacactcgttaggaagaatctgcaagtggatatttggagtgctttgaggcatatggtggaaaaggaaacaccttcacaaaaaaaatagagcagaagcattatcagaaaggtctttgggatgtgtgcattcaactcacagagttgaacctttctttgatagagcagttttgaaacactctttttgtagaatctgcagttggatatttggagcgctttgatgcctatggtggaaaaggaaatatccgcacataaaaactagacagcagcattctcagaaacttgtttgtgttgtgggcattcaactcacagagttgacgtttcctttgattgagcagttttgaaaaagtctttttgcagaatctgcaagtggatattttgagcggtttgaggcctatggtgtaaaatgaaatatcttcacataaaaactagacagaagcattctctgaaacttctttgtgatgtgtgaattcaactcgcagagttgaacctttcttttgtagagcagttttgaaactctttttgtagaatctgtaagtagatatttggagcgctttgaggcgtatggtggaaaagcaaatatcttcacataaaaactagacagaagcattctcagaaacttctttgtgataagtgcattcaactcagagagtcgaacctttctgttgatagagcagttttaaatcactgtttttctagaatctgaaagtcgatatttggagtgctttgaggcctatggtggaaaaggaaatacctacacataaaaactaggcggaagcattctcagaaatatctttgtgatgagtgcattcaactcacagagttgaacatttatgttgatagaggagttttaaaacactctttttcaggaatctgaaagtggatatttggagcgctttgaggcctatggtggaaaaggaaacaccatcacaaaaaaaaactagagcagaagcattctcaggaacttctttgtgatgtgtgcattcaactcacagagttgaacctttttttttgatagagcagttttgaaacactatttttgtacaatctgcggttggatatttggagcgctttgatgcctatggtggaaaacgaaatatccgcacataaaatctagacagcagcattctcagaaacttgtttgtgttgtgtgcattcaactcacagagttgaacctttcctttgattgagcagttttgaaaaagtctttttgtagaatccacaagtggatatttggagcagtttgaggcctatggtgtaaaaggaaatatcttcacataaaaactagacagaagcattctcagaaacttctttgtgttgtgtgcattcaactcacagagttgaacttttcctatgattgagcagttttgaaacactctttctgaagaatctgcaagtggatatttggagcgctttgaggcctatggtggaaaaggaaacaccttcacaaaaaaactagagcagaagcattctcagaaacgtctttgtgatgtgtgcattcaactcacagagttgaacctttctttgatagagcagttttgaaacactctttttgtagaatctgcagttggatatttggagcgctttgatgcctatggtggaaaaggaaatatccgcacataaaaactagacagcagcattctcagaaacttgtttgtgttgtgtgcattcaactcacagagttgacctttcctttgattgagcagttttgaaaaagtctttttgcagaatctgcaagtggatatttggagcggtttgaggcctatggtgtaaaaggaaataccttcacataaaaactagacagaagcattctctgaaacttctttgtgatgtgtgaattcaactcgcagagttgaaactttcttttgtagagcagttttgaaactctttttgtagaatctgtaagtagatatttggagcgctttgaggcttatggtggaaaaggaaatatcttcacataaaaactagacagaagcattctcagaaacttctttgtgataagtgcattcaactcacagagtcgaacctttctgttgatagagcagttttaaatcactctttttctagaatctgaaagtggatatttggagtgctttgaggcctctggtggaaaaggaaacaccttcacaaaaaaaactagaccagaagcattctcagaaacttctttgtgatgtgtgcattcaactcacagtgttgaaactttttttttgatagagcagttttgaaacactatttttgtacaatctgcggttggatatttggagcgctttgatgcctatggtggaaaacgaaatatccgcacatgaaatctagacagcagcattctcagaaacttgtttgtgttgtgtgcattcaactcacagagttgaacctttcctttgattgagcagttttgaaaaagtctttttgtagaatccacaagtggatatttggagcagtttgaggcctatggtgtaaaagcaaatatcttcacataaaaactagacagaagcattctcagaaacttctttgtgttgtgtgcattcaactcacagagttgaacttttcctatgattgagcagttttgaaacactctttctgaagaatctgcaagtggatatttggagcgctttgaggcctatggtggaaaaggaaacaccttcacaaaaaaactagagcagaagcattctcagaaacgtctttgtgatctgtgcattcaactcacagagttgaacctttctttgatagagcagttttgaaacactctttttgtagaatctgcagttggatatttggagcgctttgatgcctatggtggaaaaggaaatatccgcacataaaaactagacagcagcattctcagaaacttgtttgtgttgtgtgcattcaactcacagagttgacctttcctttgattgagcagttttgaaaaaggctttttgcagaatctgcaagtggatatttggagcggtttgaggcctatggtgtaaaaggaaatatcttcacataaaaactagacagaagcattctctgaaacttctttgtgatgtgtgaattcaactcgcagcgttgaacctttcttttgtagagcagttttgaaactctttttgtagaatctgtaagtagatatttggagcgctttgaggcttatggtggaaaaggaaatatcttcacataaaaactagacagaagcattctcagaaacttctttgtgataagtgcattcaactcacagagtcgaacctttctgttgatagagcagttttaaatcactctttttctagaatctgaaagtggatatttggagtgctttgaggcctatggtggaaaaggaaatacctacacataaaaactaggcggaagcattctcagaaatatctttgtgatgagtgcattcaactcacagagttgaacacttatgttgatagaggagttttaaaacactctttttcaggaatctgaaagtggatatttggagcgctttgaggcctatggtggaaaaggaaacaccttcacaaaaaaaaactagagcagaagcattctcagaaacttctttgtgatgtgtgcattcaactcacagagttgaacctttttttttgatagagcagttttgaaacactatttttgtacaatctgcggttggatatttggagcgctttgatgcctatggtggaaaacgaaatatccgcacataaaatctagacagcagcattctcagaaacttgtttgtgttgtgtgcattcaactcacagagttgaacctttcctttgattgagcagttttgaaaaagtctttttgtagaatccacaagtggatatttggagcagtttgaggcctatggtgtaaaaggaaatatcttcacataaaaactagacagaagcattctcagaaacttctttgtgttgtgtgcattcaactcacagagttgaacttttcctatgattgagcagttttgaaacactctttctgaagaatctgcaagtggatatttggagcgctttgaggcctatggtggaaaaggaaacaccttcacaaaaaaactagagcagaagcattctcagaaacgtctttgtgatgtgtgcattcaactcacagagttgaacctttctttgatagagcagttttgaaacactctttttgtagaatctgcagttggatatttggagcgctttgatgcctatggtggaaaaggaaatatccgcacataaaaactagacagcagcattctcagaaacttgtttgtgttgtgtgcattcaactcacagagttgacctttcctttgattgagcagttttgaaaaagtctttttgcagaatctgcaagtggatatttggagcggtttgaggcctatggtgtaaaaggaaatatcttcacataaaaactagacagaagcattctctgaaacttctttgtgatgtgtgaattcaactcacagagttgaacctttcttttgtagagcagttttgaaactctttttgtagaatctgtaagtagatatttggagcgctttgaggcttatggtggaaaaggaaatatcttcacataaaaactagacagaagcattctcagaaacttcttcgtgataagtgcattcaactcacagagtcgaaccttcttttgatagagcagttttaaatcannnnnnnnnnnnnnnnnnnnnnnnnnnnnnnnnnnnnnnnnnnnnnnnnnnnnnnnnnnnnnnnnnnnnnnnnnnnnnnnnnnnnnnnnnnnnnnnnnnnagcattctctgaaacttctttgtgatgtgtgaattcaactcacagagttgaacctttcttttgtagagcagttttgaaactctttttgtagaatatgtaagtatatatttggagcgctttgaggcttatggtggaaaaggaaatatcttcacataaaaactagacagaagcattctcagaaacttctttgtgataagtgcattcaactcacagagtcgaacctttctgttgatagagcagttttaaatcactcttttctagaatctgaaagtggatatttggagtgctctgaggcctatggtggaaaaggaaatacctacacataaaaactaggcggaagcattctcagaaatatctttgtgatgagtgcattcaactcacagagttgaacacttatgttgatagaggagttttaaaacactctttttcaggaatctgaaagtggatatttggagcgctttgaggcctgtggtggaaaaggaaacaccttcacaaaaaaaatagagcagaagcattctcaggaacttctttgtgatgtgtgcattcaactcacagagttgaacctttttttttgatagagcagttttgaaacactatttttgtacaatctgcagttggatatttggagcgctttgatgcctatggtggaaaacgaaatatccgcacataaaatctagacagcagcattctcagaaacttgtttgtgttgtgtgcattcaactcacagagttgaacctttcctttgattgagcagttttgaaaaagtctttttgtagaatccacaagtggatatttggagcagtttgaggcccatggtgtaaaaggaaatatcttcacataaaaactagacagaagcattctcagaaaattctttgtgttgtgtgcattcaactcacagagttgaacttttcctatgattgagcagttttgaaacactctttctgaagaatctgcaagtggatatttggagcgctttgaggcctatggtggaaaaggaaacaccttcacaaaataactagagcagaagcattctcagaaacgtctttgtgatatgtgcattcaactcacagagttgaacctttctttgatagagcagttttgaaacactctttttgtagaatctgcagttggatatttggagcgctttgatgcctatggtggaaaaggaaatatccgcacataaaaactagacagcagcattctcagaaacttgtttgtgttgtgtgcattcaactcacagagttgaacctttcctttgattgagcagttttgaaaaagtctttttgcagaatctgcaagtggatatttggagcggtttgaggcctatggtgtaaaaggaaatatcttcacataaaatctagacggaaagcattctctgaaacttctttgtgatgtgtgaattcaactcacagagttgaacctttcttttgtagagcagttttgaaactctttttgtagaatgtgtaagtagatatttggagcgctttgaggcttatggtggaaaaggaaatatcttcacataaaaactagacagaagcattctcagaaacttctttgtgataagtgcattcaactcacagagttgagcctttcttttgatagagcagttttaaaacactctttttctagaatctgaaagtggatatttggagtgctttgaggcctatggtggaaaaggaaatatcttcacatagaaactaggcagaagcattgtcagtaactaatttgtgttgtgtgcattcaactctcagagttgtatttttcctttgattgagcagttttgaaacactctttttgtagaatctgcaagtggatatttggagcgctttgaggcctatggtggaaaaggaaacaccttcacaaaaaaactggagcagaagcattctcagaaacttctttgtgatgtgtgcattcaactcacagaattgaacctttctttgatagagcagttttgaaacactatttttgtagaatctgcaattggatatttggagcgctttgatgcctatggtggaaaaggaaatatccacacataaaatctagacagcagcattctcagaaacttgtttgtgttgtgtgcattcaactcacagagttgacctttcctttgattgagcagttttgaaaaaatctttttgcagaatctgcaagtggatatttggagcggtttgaggcctatggtgtaaaaggaaatatcttcacataaaaactagacagaagcattctctgaaacttctttgtgatgtgtgaattcaactcacagagttgaacctttcttttgtagagcagttttgaaactctttttgtagaatctgtaagtagatatttggagtgctttgaggcttatggtggaaaaggaaatatcttcacataaaaactagacagaagcattctcagaaacttctttgtgataagtgcattcaactcacagagtcgaacctttctgttgatagagcagttttaaatctctctttttctacaatctgaatgtggatatttggagtgctctgaggcatatggtggaaaaggaaatacctacacataaaaactaggcggaagcattctcagaaatatctttgtgatgagtgcattcacctcacagagttgaacatttatgttgatagaggagttttaaaacacactttttcgggaatatgaaagtggatatttggagcgctttgaggcctatggtggaaaaggaaacaccttcacaaaaaaaactagagcagaagcattctcagaaagttctttgtgatgtgtgcattcaactcacagagttgaacctttttttttgatagagcagttttgaaacactatttttgtacaatctgcggttggatatttggagcgctttgatgcctatggtggaaaacgaaatatccgcacataaaatctagacagcagcattctcagaaacttgtttgtgttgtgtgcattcaactcacagagttgaacctttcctttgattgagcagttttgaaaaagtctttttgtagaatccacaagtggatatttggagcagtttgaggcctatggtgtaacaggaaatatcttcacataaaaactagacggaagcattctcagaaacttctttgtgttgtgtgcattcaactcacagagttgaacttttcctatgattgagcagttttgaaacactctttctgaagaatctgcaagtggatatttggagcgctttgaggcctatggtggaaaaggaaacaccttcacaaaaaaactagagcagaagcattctcagaaacgtctttgtgatgtgtgcattcaactcacagagttgaacctttctttgatagagcagttttgaaaaactctttttgtagaatctgcagttggatatttggagcgctttgatgcctatggtggaaaaggaaatatccgcccataaaaactagacagcagcattctcagaaagttgtttgtgttgtgtgcattcaactcacagagttgaacctttcctttgattgagcagttttgaaaaagtctttttgtagaatctgcaagtggatatttggagcagtttgaggcctatggtgtaaaaggaaatatcttcacatgaaaactagacagaagcattctcagaaacttctttgtgatgagttcattcaattcacatagttgaacatttcttttgatagagtagttttgaaacactctttctgtagaatctacaagtggatatttggagcacattgaagcctatgatggaaaaggaaatatcttcacatacaaactagacagaagcattctcagaaacttctttgtgataagtgcattcaactcacagagtcgaacctttctgttgatagagcagttttaaatcactctttttctagaatctgaaagtggatatttggagagctttgaggcctatggtggaaaaggaaatacctacgcataaaaactatgcggaagcattctcagaaatatctttgtgatgagtgcattcaactcacagagttgaacatttatgttgatagaggagttttaaaacactctttttcaggaatctgaaagtggatatttggagcgctttgaggcctatggtggaaaaggaaacaccttcacaaaaaaaactagagcagaatcattctcaggaacttctttgtgatgtgtgcattcaactcacagagttgaacctttttatttgatagagcagttttgaaacactatttttgtacaatctgcggttggatatttggagcgctttgatgcctatggtggaaaacgaaatatccgcacataaaatctagacagcagcattctcagaaacttgttagtgttgtgtgcattcagctcacagagttgaacctttcctttgattgagcagttttgaaatagtctttttgtagaatccacaagtggatatttggaacagtttgaggcctatggtgtaaaaggaaatatcttcacataaaaactatacagaagcattctcagaaacttctttgtgttgtgtgcattcaactcacagagttgaacttttcctatgattgagcagttttgaaacactctttctgaagaatctgcaagtggatatttggagcgctttgagacatatggtggaaaaagaaacaccttcacaaaaaaactagagcagaagcattctcagaaacgtctttgtgatgtgtgcattcaactcacagagttgaacctttctttgatagagcagttttgaaacactctttttgtaggatctgcagttggatatttggagcgctttgatgcctatggtggaaaaggaaatatccgcacataaaaactagacagcagcattctcagaaacttgtttgtgttgtgtgcattcaactcacagagttgacctttcctttgattgagcagttttgaaaaagtctttttgcagaatctgcaagtggatatttggagcggtttgtgtcctatggtgtaaaaggaaatctcttcacataaaaactagacagaagcattctctgaaacttctttgtgatgtgtgaattcaactcacagagttgaacctttcttttgtagagcagttttgaaactctttttgtagaatgtgtaagtagatatttggagcgctttgaggcttatggtggaaaaggaaatatcttcacataaaaactagacagaagcattctcagaaacttctttgtgataagtgcattcaactcacagagtcgaaactttctgttgatagagcagttttaaatccctctttttctagaatctgaaagtggatatttggagtgctctgaggcctatggtggaaaaggaaatacctacccataaaaactaggcggaagcattctcagaaatatctttgtgatgagtgcattcaactcacagagttgaacatttatgttgatagaggagttttaaaacactctttttcgggaatctgaaagtggatatttggagcgctttgaggcctatggtggaaaaggaaacaccttcacaaaaaaaactagagcagaagcattctcagaaagttctttctgatgtgtgcattcaactcacagagttgaatctttttttttgatagagcagttttgaaacactatttttgtacaatctgcagttggatatttggagcgctttgatgcctatggtggaaaacgaaatatccgcacataaaatctagacagcaacattctcagaaacttgtttgtgttgtgtgcattcaactcacagagttgaacctttcctttgattgagcagttttgaaaaagtctttttgtagaatccacaagtggatatttggagcagtttgaggcctatggtgtaaaaggaaatatcttcacataaaaactagacagaagcattctctgaaacttctttgtgatgtgtgaattcatctcacagagttgaacctttcttttgtagagcagttttgaaactctttttgtagaatctgtaagtagatatttggagcgctttgaggcttatggtagaaaaggaaatatcttcacataaaaactagacagaagcattctcagaaacttctttgtgataagtgcattcaactcacagagtcgaacctttctgttgatagagcagttttaaatcactctttttctagaatctgaaagtggatatttggagtgctttgaggcctatggtggaaaaggaaatacctacacataaaaactaggcggaagcattctcagaaatatctttgtgatgagtgcattcaactcacagagttgaacatttatgttgatagaggagttttaaaacactctttttcgggaatctgaaagtggatatttggagcgctttgaggcctatggtggaaaaggaaacaccttcacaaaaaaaactagagcagaagcattctcagaaacttctttgtgatgtgtgcattcaactcacagagttgaacctttttttttgatagagcagttttgaaacactatttttgtacaatctgcggttggatatttggagcgctttgatgcctatggtggaaaacgaaatatccggacataaaatctagacagcagcattctcagaaacttgtttgtattgtgtgcattcaactcacagagttgaacctttcctttgattgagtagctttgaaaaagtctttttgtagaatccacaagtggatatttggagcagcttgaggcctatggtgtaaaaggaaatatcttcacataaaaactagacagaagcattctcagaaacttctttgtgttgtgtgcattcaactcacagagttgaacttttcctatgattgagcagttttgaaacactctttctgaagaatctgcaagtggatatttggagcgctttgaggcctatggtggaaaaggaaacaccttcacaaaaaaactagagcagaagcattctcagaaatgtctttgtgatgtgtgcattcaactcacagagttgaacctttctttgatagagcagttttgaaacactctttttgtagaatctgcagttggatatttggagcgctttgatgcctatggtggaaaaggaaatatccgcacataaaaactagacagcagcattctcagaaacttgtttgtgttgtgtacattcaactcacagagttgagctttcctttgattgagcagttttgaaaatgtctttttgcagaatctgcaagtggatatttggagcggtttgaggcctatggtgtaaaaggaaatatcttcacataaaaactagacagaagcattctctgaaacttctttgtgatgtgtgaattcaactcacagagttgaacctttcttttgtagagcagttttgaaactctttttgtagaatctgtaagtagatatttggagcgctttgaggcttatgttggaaaaggaaatatcttcacataaaaactagacagaagcattctcagaaacttcttagtgataagtgcattcaactcacagagtcgaacctttctgttgatagagcagttttaaatcactctttttctagaatctgaaagtggatatttggagtgctttgaggcctatggtggaaaaggaaatacctacacataaaaactaggcggaagcattctcagaaatatctttgtgatgagtgcattcaactcacagagttgaacacttatgttgatagaggagttttaaaacactctttttcaggaatctgaaagtggatatttggagcgctttgaggcctatggtggaaaaggaaacaccttcacaaaaaaaactagagcagaagcattctcagaaagttctttgtgatgtgtgcattcaactcacagagttgaacctttttttttgatagagcagttttgaaacactatttttgtacaatctgcggttggatatttggagcgctttgatgcctatggtggaaaacgaaatatccgcacataaaatctagacagcagcattctcagaaacttgtttgtgttgtgtgcattcaactcacagagttgaacctttcctttgattgagaagttttgaaaaagtctttttgtagaatccacaagtggatatttggagcagtttgaggcctatggtgtaaaaggaaatatcttcacataaaaactagacagaagcattctcagaaacttctttgtgttgtgtgcattcaactcacagagttgaacttttcctatgattgagcagttttgaaacactctttctgaagaatctgcaagtggatatttggagcgctttgaggcctatggtggaaaaggaaacaccttcacaaaaaaactagagcagaggcattctcagaaacttctttgtgatttgtgcattcaactcacagagttgaacctttctttgatagagcagttttgaaacactctttttgtagaatctgcaattggatatttggagctctttgatgcctatggtgggaaaggaaatatccgcacatataaactagacagcagcattctcagaaacttgtttgtgttgtgtgcattcaactcacagagttgacctttcctttgattgagcagttttgaaaaagtctttttgcagaatctgcaagtggatatttggagcggtttgaggcctatggtgtaaaaggaaatatcttcacataaaaactagacagaaccattctctgaaacttctttgtgatgtgtgaattcaactcgcagagttgaacctttcttttgtagagcagttttgaaactctttttgtagaatgtgtaagtagatatttggagcgctttgaggcttatggtggaaaaggaaatatcttcacataaaaactagacagaagcattctcagaaacttctttgtgataagtgcattcaacccacagagtcgaacgtttctgttgatagagcagttttaaatcactctttttctagaatctgaaagtggatatttggagtgctttgaggctcatggaggaaaaggaaatacctacacataaaaactaggcggaagcattctcagaaatatctttgtgatgagtgcattcaactcacagagttgaacatttatgttgatagaggagttttaaaacactctttttcaggtatctgaaagtggatatttggagcgctttgaggactatggtggaaaaggaaacaccttcacaaaaaaaaactagagcagaagcattctcaggaacttctttgtgatgtgtgcattcaactcacagagttgaacctttttttttgatagagcagttttgaaacactatttttgtacaatctgcggttggatatttggagcgctttgatgcctatggtggaaaacgaaatatccgcacataaaatctagacagcagcattctcagaaacttgtttgtgttgtgtgcattcaactcacagagttgaacctttcctttgattgagcagttttgagaaagtctttttgtagaatccacaagtggatatttggagcagtttgaggcctatggtgtaaaaggaaatatcttcacataaaaactatacagaagcattctcagaaacttctttgtgatgtgtgaaatcaactcacagagttgaacctttctttcgtagagcagttttgaaacactctttttgtagaatctgcaagtagatatttggagcgctttgaggcttatggtggaaaaggaaatatcttcacataaaaactatacagaagtattctcagaaacgtctttgtgatgtgtgcattcaacacgcagagttgaacctttctttgatagagcagttttgaaacactctttttgtagaatctgcagttggatatttggagcgctttgatgcctatggtggaaaaggaaatatccgcacataaaaactagacagcagcattctcagaaacttgtttgtgttgtgtgcattcaactcacagagttgaaactttcctttgattgagcagttttgaaaaagtccttttgcagcatctgcaagcggatatttggagcgtttgaagcctatggtgtaaaaggaaatatcttcacataacaactagacagaagcattctctgaaacttctttgtgatgtgtgcattcaagtcacagagttgaacctttcttttgtagagcagttttgaaactctctttttgtagaatctgcaagtagatatatggagcgctttgaggcttacggtggaaaaggaaatatcttcacataaaaactagacagaagcattctcagaaacttctttgtgataagtgcattcaactcacagagttgaacatttctgttgatagagcagttttaaaacactctttttctagaatctgaaagtggatatttggagtgctttgaggcctctggtggaaaaggaaatatcttcacataaaaactagacggaagcattctcagaagtatctttgtgatgagtgcattcaactcacagagttgaaaacttaaattgatagaggagttttaaaacactctttttcaggaatctgaaagtggatatttggagcgctttgaggcctatggtggaaaaggaaacaccttcacaaaaaaaactagagcagaagcattctcagaaacttctttgtgatgtgtgcattcaactcacagagttgaacctttttttttgatagagcagttttgcaacactatttttgtacaatgtgcggttggatgtttggagctctttgatgcctatggtggaaaacgaaatatccgcacataaaatctagacagcagcattctcagaaacttgtttgtgttgtgtgcattcaactcacagaattgaaacttttctttgattgagcagttttaaaaaagtctttttgtagaatctgcaagtggatatttggagcagtttgaggcctatggtgtaaaaggaaatatcttcacataaaaactagacagaagcattctcagaatcttctttgtgttgtgtgcattcaactcacagagttgaacttttcctatgattgagcagttttgaaacactctttctgaagaatctgcaagtggatatttggagcgctttgaggcctatggtggaaaaggaaacaccttcacaaaaaaactagagcagaagcattctcagaaacgtctttgtgatgtgtgcattcaactcacagagttgaacctttctttgatagagcagttttcacacactctttttgtagaatctgcagttggatatttggagcgctttgatgcctatggtggaaaaggaaatatccgcacataaaaactagacagcagcattctcagaaacttgtttgtgttgtgtgcattcaactcacagagttgagctttcctttgattgagcagttttgaaaaagtctttttgcagaatctgcaagtggatatttggagcggtttgaggcctatggtgtaaaaggaaatatcttcacataaaaactagacagaagcattctctgaaacttctttgtgatgtgtgaattcaactcacagagttgaacctttcttttgtagagcggttttgaaactctttttgtagaatgtgtaagtagatatttggagcgctttgaggcttatggtggaaaaggaaatatcttcacataaaaactagacagaagcattctcagaaacttctttgtgataagtgcattcaactcacagagtcgaacctttctgttgatagagcagttttaaatcactctttttctagaatctgaaagtggatatttggagtgctttgaggcctatggtggaaaaggaaatacctacacataaaaactaggcggaagcattctcagaaatatctttgtgatgagtgcattcaactcacagagttgaacatttatgttgatagaggagttttaaaacactctttttcaggaatctgcaagtggatatttggagcggtttgagtcctatggtgtaaaaggaaatatcttcacgtaaaaactagacagaagcattctcagaatcttgtttgtgttgtgtgcattcagctcacagagttgaacctttttttttgatagagcagttttgaaacactatttttgtacaatctgcggttggatatttcgagcgctttgatgcctatggtggaaaacgaaatatccgcacataaaatctagacagcagcattctcagaatcttgtttgtgttgtgtgcattcagctcacagagttgaacatttcctttgactgagcagttttgaaatagtctttttgtagaatccacaagtggatatttggagcagtttgaggcctatggtgtaaaaggaaatatcttcacataaaaactagacagaagcattctcagaaacttctttgtgttgtgtgcattcaactcacagagttgaacttttcctatgattgagcagttttgaaacactctttctgaagaatctgcaagtggatatttggagcgctttgaggcctatggtggaaaaggaaacaccttcacaaaaaaactagagcagaaacattctcagaaaattctttgtgatgtgtgcattcaactcacagagttgaacctttctttgatagagcagttttgaaacactctttttgtagaatctgcaattggatatttggagctctttgatgcctatggtggaaaaggaaatatccgcacataaaaactagacagcagcattgtcagaaacttgtttgtgttgtgtgcattcaactcacagagttgacctttcctttgattgagcagttttgaaaaagtctttttgcagaatctgcaagtggatatttggagcggtttgaggcctatggtgtaaaaggaaatatcttcacataaaaactagacagaagcattctctgaaacttctttctgatgtgtgaattcaactcacggagttgaacctttcttttgtagagcagttttgaaactctttttgtagaatctgtaagtagatatttggagcgctttgaggcttatggtggaaaaggaaatatcttcacataaaaactagacagaagcattctcagaaacttctttgtgataagtgcatttaactcacagagtcgatcctttctgttgatagagcagttttaaatcactctttttctagaatctgaaagtggatatttggagtgctttgaggcctatggtggaaaaggaaatacctacacataaaaactaggcgtaagcattctcagaaatatctttgtgatgagtgcactcaactcacggagttgatcatttctttgatagaggagttttaaaacactctttttctggaatctcaaagtggatatttggagcgctttaaggcctatggtggaaaaggaaacactttcacaaaaaaactagagcagaagcattctcagaaacttctttgtgatgtgtgcattcaactcacagagttgaacctttttttttgatagagcagttttgcaacactatttttgtacaatgtgcggttggatgtttggagctctttgatgcctatggtggaaaacgaaatatccgcacataaaatctagacagcagcattctcagaaacttgtttgtgttgtgtgcattcaactcacagagttgaacctttcctttgattgagcagttttgaaaaagtctttttgtagaatccacaagtggatatttggagcagtttgaggcctatggtgtaaaaggaaatatcttcacataaaaactagacagaagcattctcagaaacttctttgtgttgtgtgcattcaactcacagagttgaacttttcctatgattgagcagttttgaaacactctttctgaagaatctgcaagtggatatttggagcgcattgaggcctatggtggaaaaggaaacaccttcacaaaaaaactagagcagaagcattctcagatacgtctttgtgatgtgtgcattcaacttacagagttgaacctttctttgatagagcagttttgaaacactctttttgtagaatctgcagttggatatttggagcgctttgatgcctatggtggaaaaggaaatatccgcacataaaaactagacagcagcattctcagaaacttgtttgtgttgtgtgcattcaactcacagagttgacctttcctttgattgagcagttttgaaaaagtctttttgcagaatctgcaagtggatatttggagcggtttgaggcctatggtgtaaaaggaaatatcttcacataaaaactagacagaagcattctctgaaacttctttgtgatgtgtgaattcaactcacagagttgaacctttcttttgtagagcaggtttgaaactctttttgtagaatctgtaagtagatatttggagcgctttgaggcttatggaggaaaaggaaatatcttcacataaaaactagacagaagcattctcagaaacttctttgtgataagtgcattcaactcacagagtcgaacctttctgttgatagagcagttttaaatcactctttttctagaatctgaaagtggatatttggagtgctttgaggcctatggtggaaaaggaaatacctacacataaaaaataggaggaagcattctcagaaatatctttgtggtgagtgcattcaactcacagagttgaacaattatgttgatagaggagttttaaaacactctttttcaggaatctgaaagtggatatttggagcgctttgaggcctatggtggaaaaggaaacaccatcacaaaaaaaaactagagcagaagcattctcagaaacttctttgtgatgtgtgcattcaactcacagagttgaacctttttttttgatagagcagttttgaaacacaattttggtacaatctgcggttggacatttggagcgctttgatgcctatggtggaaaacgaaatatccgcacataaaatctagacagcagcattctcagaaacttgtttgtgttgtgtgcattcaactcacagagttgaaactttcctttgattgagcagttttgaaaaagtctttttgaagaatccacaagtggatatttggagcagtttgaggcctatggtgtaaaaggaaatatcttcacataaaaactagacagaagcattctcagaaacttctttgtgttgtgtgcattcaactcacagagttgaacttttcctatgattgagcagttttgaaacactctttctgaagaatctgcaagtggatatttggagcgctttgaggcctatggtggaaaaggaaacatcttcacaaaaaaaactagagaagaagcattctcagaaacgtctttgtgatgtgtgcattcaactcacagagttgaaactttctttgatagagcagttttgaaacactctttttgtagaatctgcagttggatatttggagcgctttgatgcctatggtggaaaaggaaatatccgcacataaaaactagacagcagcattctcagaaacttgtttgtgttgtgtgcattcaactcacagagttgaacctttcctttgattgagcagttttgaaaaagtctttttgcagaatctgcaagtggatatttggagcggtttgaggcctatggtgtaaaaggaaatatcttcacataaaatctagacggaagcattctctgaaacttctttgtgatgtgtgaattcaactcacagagttgaacctttcttttgtagagcagttttgaaactctttttgtagaatctgtaagtagatatttggagcgctttgaggcttatggtggaaaaggaaatatcttcacataaaaactagacagaagcattctcagaaacatctttctgataagtgcattcaactcacagagtcgaacctttctgttgatagagcagttttaaatcactctttttctagaatctgaaagtggatatttggagtgctctgaggcctatggtggaaaaggaaatacctacacataaaaactaggcggaagcattctcagaaatatctttgtgatgactgcattcaactcacagagttgaacatttatgttgatagaggagttttaaaacactctttttcaggaatctgaaagtggatatttggagcgctttgaggcctatggtggaaaaggaaacaccttcacaaaaaaaaactagagcagaagcattctcaggaacttctttgtgatgtgtgcattcaactcacagagttgaacctttttttttgatagagcagttttgaaacactatttttgtacaatctgcggttggatatttggagcgctttgatgcctatggtggaaaacgaaatatccgcacataaaatctagacagcagcattctcagaaacttgtttgtgttgtgtgcattcaactcacagagttgaacctttcctttgattgagcagttttgaaaaagtctttttgtagaatccacaagtggatatttggagcagtttgaggcctatggtgtaaaaggaaatatcttcacataaaaactagacagaagcattctcagaaacttctttgtgttgtgtgcattcaactcacagagttgaacttttcctatgattgagcagttttgaaacactctttctgaagaatctgcaagtggatatttggagcgctttgaggcctatggtggaaaaggaaacaccttcacaaaaaaactagagcagaagcattctcagaaacgtctttgtgatgtgtgcattcaactcacagagttgaacctttgtttgatagagtagttttgaaacactctttttgtagaatctgcagttggatatttggagcgctttgatgcctatggtggaaaaggaaatatccgcacataaaaactagacagcagcattctcagaaacttgtttgtgttgtgtgcattcaactcacagagttgagctttcctttgattgagcagttttgaaaaagtctttttgcagaatctgcaagtggatatttggagcggtttgaggcctatggtgtaaaaggaaatatcttcacataaaaactagagagaagcattctctgaaacttctttgtgatgtgtgaattcaactcacagagttgaacctttcttttgtagagcagttttgaaactctttttgtagaatctgtaagtagatatttggagtgctttgaggcttatggaggaaaaggaaatatcttcacataaaaactagacagaagcattctcagaaacttctttgtgataagttcattcaactcacagagtcgaacctttctgttgatagagcagttttaaatcactctttttctagaatctgaaagtggatatttggagtgctctgaggcctatggtggaaaaggaaatgcctacacataaaaactaggcagaagcattctcagaaatatctttgtgatgagtgcattcaactcacagagttgaacatttatgttgatagaggagttttaaaacacactttttcaggaatctgaaagtggatatttggagcgctttgaggcctatggtggaaaaggaaacaccttgacaaaaaaaactagagcagaagcattctcagaaacttctttgtgatgtgtgcattcaactcacagagttgaacctttttttttgatagagcagttttgcaacactatttttgtacaatgtgcggttggatgtttggagctctttgatgcctatggtggaaaacgaaatatccgcacataaaatctagacagcagcattctcagaaacttgtttgtgttgtgtgcattcaactcacagagttgaacctttcctttgattgagcagttttgaaaaagtctttttgtagaatccacaagtggatatttggagcagtttgaggcctatggtgtaaaaggaaatatcttcataaaaactagacagaaagcattctcagaaacttctttgtgttgtgtgcattcaactcacagagttgaacttttcctatgattgagcagttttgaaacactctttctgaagaatctgcaagtggatatttggagcgctttgaggcctacggtggaaaaggaaacaccttcacaaaaaaactagagcagaagcattctcagaaacgtctttgtgatgtgtgcattcaactcacagagttgaacctttctttgatagagcagttttgaaacactctttttgtagaatctgcagttggatatttggagcgctttgatgcctatggtgcaaaaggaaatatccgcacataaaaactagacagcagcattctcagaaacttgtttgtgttgtgtgcattcaactcacagagttgagctttcctttgattgagcagttttgaaaaagtctttttgcagaatctgcaagtggatatttggagcggtttgaggcctatggtgtaaaaggaaatatcttcacataaaatctagacagaagcattctctgaaacttctttgtgatgtgtgaattcaactcacagagttgaacctttcttttgtagagcagttttgaaactctttttgtagaatctgtaagtagatatttggagtgctttgaggcttatggtggaaaaggaaatatcttcacataaaaactagacagaagcattctcagaaacttctttgtgataagtgcattcaactcacagagtcgaacctttctgtggatagagcagttttaaatcactctttttctagaatctgaaagtggatatttggagtgctttgaggcctatggtggaaaaggaaatacctacacataaaaactaggcgtaagcattctcagaaatatctttgtgatgagtgcattcaactcacagagttgaacacttatgttgatagaggagttttaaaacactctttttcaggaatctgaaagtggatatttggagcgctttgaggcctgtggtggaaaaggaaacaccttcacaaaaaaaactagagcagaagcattctcagaaacttctttgtgatgtgtgcattcaactcacagagttgaacctttttttttgacagagcagttttgaaacagtatttttgtacaatctgcggttggatatttggagcgctttgatgcctatggtggaaaacgaaatatccgcacataaaatctagacagcagcattctcagaaacttgtttgtgttgtgtgcattcagctcacagagttgaacctttcctttgattgagtagttttgaaaaagtctttttgtagaatccacaagtggatatttggagcagtttgaggcctatggtgtaaaaggaaatatcttcacataaaaactagacagaagcattctctgaaacttctatgtgataagtgcattcaactcacagagtcgaacctttctgttgatagagcagttttaaatcactctttttctagaatctgaaagtggatatttggagtgctttgaggcttatggtggaaaaggaaatatcttcacataaaaactagacagaagcattctcagcaaacttctttgtgataagtgcattcaactcacagagtcgaacctttctgttgatagagcagttttaaatcactctttttctagaatctgaaagtggatatttggagtgctttgaggcctatggtggaaaaggaaatacctacacataaaaactaggcggaagcattctcagaaatatctttgtgatgactgcattcaactcacagagttgaacacttatgttgatagaggagttttaaaacactctttttcaggaatctgaaagtggatatttggagtgctttgaggcctgtggtggaaaaggaaacaccatcacaaaaataactagagcagaagcattctcaggaacttctttgtgatgtgtgcattcaactcacagagttgaacctttttttttgatagagcagttttgaaacactatttttgtacaatctgcggttggatatttggagcgctttgatgcctatggtggaaaacgaaatatccgcacataaaatctagacagcaacattctcagaaacttgtttgtgttgtgtgcattcaactcacagagttgaacctttcctttgattgagcagttttgaaaaagtctttttgtagaatccacaagtggatatttggagcagtttgaggcctatggtgtaaaaggaaatatcttcacataaaaactagacagaagcattctcagaaacttctttgtgttgtgtgcattcaactcacagagttgaacttttcctatgattgagcagttttgaaacactctttctgaagaatctgcaagtggatatttggagcgctttgaggcctatggtggaaaaggaaacaccttcacaaaaaaactagagcagaagcattctcagaaacgtctttgtgatgtgtgcattcaactcacagagttgaacctttctttgatagagcagttttgaaacactctttttgtagaatctgcagttggatatttggagcgctttgatgcctatggtggaaaaggaaatatccgcccataaaaactagacagcagcattctcagaaacttttttgtgttgtgtgcattcaactcacagagttgagctttcctttgattgagcagttttgaaaaagtctttttgcagaatctgcaagtggatatttggagcggtttgaggcctatggtgtaaaaggaaatatcttcacataaaaactagacagaagcattctctgaaacttctttgtgatgtgtgaattcaactcacagagttgaacctttcttttgtagagcagttttgaaactctttttgtagaatctgtaagtagatatttggagcgctttgaggcttatggtggaaaaggaaatatcttcacataaaaactagacagaagctttctcagaaacttctttgtgataagtgcattcaactcacagagtcgaacctttctgttgatagagcagttttaaatcactctttttctggaatctgaaagtggatatttggagtgctctgaggcctatggtggaaaaggaaatacctacacataaaaactaggcggaagcattctcagaagtatctttgtgatgagtgcattcaactcacagagttgaacacttatgttgatagaggagttttaaaacactctttttcaggaatctgaaagtggatatttggagcgctttgaggcctatggtggaaaaggaaacaccttcacaaaaaaaactagagcagaagcattctcagaaacttcgttgtgatgtgtgcattcaactcacagagttgaaactttttatttgatagagcagttttgaaacactatttttgtacaatctgcggttggatatttggagcgctttgatgcctatggtggaaaacgaaatatccgcacataaaatctagacagcagcattctcagaaacttgtttgtgttgtgtgcattcagctcacagagttgaacctttcctttgactgagcagttttgaaatagtctttttgtagaatccacaagtggatatttggagcagtttgaggcctatggtgtaaaaggaaatatcttcacataaaaactagacagaagcattctcagaaacttctttgtgttgtgtgcattcaactcacagagttgaacttttcctatgattgagcagttttgaaacactctttctgaagaatctgcaagtggatatttggagcgctttgaggcctatggtggaaaaggaaacaccttcacaaaaaaactagagcagaagcattctcagaaacgtctttgtgatgtgtgcattcaactcacagagttgaacctttctttgatagagcagttttgaaacactctttttgtagaatctgcagttggatatttggagcgctttgatgcctatggtggaaaaggaaatatccgcacataaaaactagacagcagcattctcagaaacttgtttgtgttgtgtgcattcaactcacagagttgacctttcctttgattgagcagttttgaaaaagtctttttgcagaatctgcaagtggatatttggagcggtttgaggcctatggtgtaaaaggaaatatcttcacataaaatctagacagaagcattctctgaaacttctttgtgatgtgtgaattcaactcacagagttgaacctttcttttgtagagcagttttgaaactctttttgtagaatctgtaagtagatatttggagcgctttgaggcttatggtggaaaaggaaatatcttcacataaaaactagacagaagcattctcagaaacttctttgtgataagtgcattcaactcacagagtcgaacctttctgttgatagagcagttttaaatcactctttttctagaatctgaaagtggatatttggagtgctttgaggcctatggtggaaaaggaaatacctacacataaaaactaggcggaagcattctcagaaacttctttgtgataagtgcattcaactcacagagtcgaacctttctgttgatagagcagttttaaatcactctttttctagaatctgaaagtggatatttggagtgctttgaggcctctggtggaaaaggaaacaccttcacaaaaaaaactagaccagaagcattctcagaaacttctttgtgatgtgtgcattcaactcacagtgttgaaactttttttttgatagagcagttttgaaacactatttttgtacaatctgcggttggatatttggagcgctttgatgcctatggtggaaaacgaaatatccgcacatgaaatctagacagcagcattctcagaaacttgtttgtgttgtgtgcattcaactcacagagttgaacctttcctttgattgagcagttttgaaaaagtctttttgtagaatccacaagtggatatttggagcagtttgaggcctatggtgtaaaaggaaatatcttcacataaaaactagacagaagcattttcagaaacttctttgtgttgtgtgcattcaactcacagagttgaacttttcctatgattgagcagttttgaaacactctttctgaagaatctgcaagtggatatttgtagcgctttgaggcctgtggtggaaaaagaaacaccttcacaaaaaaactagagcagaagcattctcagaaacgtctttgtgatgtgtgcattcaactcacagagttgaacctttctttgatagagcagttttgaaacactctttttgtagaatctgcagttggatatttggagcgctttgatgcctatggtggaaaaggaaatatccgcacataaaaactagacagcagcattctcagaaacttgtttgtgttgtgtgcattcaactcacagagttgacctttcctttgattgagcagttttgaaaaagtctttttgcagaatctgcaagtggatatttggagcggtttgaggcctatggtgtaaaaggaaatatcttcacataaaaactagacagaagcattctctgaaacttatttgtgatgtgtgaattcaactcgcagagttgaacctttcttttgtagagcagttttgaaactctttttgtagaatctgtaagtagatatttggagcgctttgaggcttatggtggaaaaggaaatatcttcacataaaaactagacagaagcattctcagaaacttcttcgtgataagtgcattcaactcacagagtcgaacctttctgttgatagagcagttttaaatcactctttttctagaatctgaaagtggatatttggagtgctttgaggcctatggtggaaaaggaaatacctacacataaaaactaggcggaagcattctcagaaatatctttgtgatgagtgcattcaactcacagagttgaacatttatgttgatagaggacttttaaaagactctttttcaggaatctgaaagtggatatttggagcgctttgaggcctatggtggaaaaggaaacaccttcacaaaaaaaactagagcagaagcattctcagaaacttctttgtgatgtgtgcattcaactcacagagttgaacctttttttttgatagagcagttttgaaacactatttttgtacaatctgcggttggatatttggagggctttgatgcctatggtggaaaacgaaatatccgcagataaaatctagacagcagcattctcagaaacttctttgtgatgagttcattcaattcacatagttgaacatttcttttgatagagcagttttgaaacactctttctgtagaatctacaagtggatatttggagcacattgaagcctatgatggaaaaggaaatatcttcacatacaaactagacagaagcattctcagaaacttctttgtgttgtgtgcattcaactcacaaagttgaacttttcctatgattgagcagttttgaaacactctttctgaagaatctgcaagtggatatttggacgtgctttgaggtctatggtggaaaagcaaacaccttcacaaaaaaaactagagcagaagcattctcagaaacgtctttgtgatgtgtgcattcaactcacagagttgaatctttctttgatagagcagttttgaaacactctttttgtagaatctgcagttggatatttggagcgctttgatgcctatggtggaaaaggaaatatccgcccataaaaactagacagcagcattctcagaaacttgtttgtgttgtgtgcattcaactcacagagttgaacctttcctttgattgagcagttttgaaaaagtctttttgcagaatctgcaagtggatatttggagcggtttgaggcctatggtgtaaaaggaaatatcttcacataaaatctagacggaagcattctctgaaacttctttgtgatgtgtgaattcaactcacagagttgaacctttcttttgtagagcagttttgaaactctttttgtagaatctgtaagtagatatttggagtgctttgaggcttatggtggaaaaggaaatatcttcacataaaaactagacagaagcattctcagaaacttctttgtgataagtgcattcaactcacagagtcgaacctttctgtggatagagcagttttaaatcactctatttctagaatctgaaagtggatatttggagtgctttgaggcctatggtggaaaaggaaatacctacacataaaaactaggcgtaagcattctcagaagtatctttgtgatgagtgcattcaactcacagagttgaacacttatgttgatagaggagttttaaaacactctttttcaggaatctgaaagtggatatttggagcgctttgaggcctatggtggaaaaggaaacaccttcacaaaaaaaactagagcagaagcattctcagaaacttcttgtattgtgtgcattcaactcacagagttgaacctttttatttgatagagcagctttgaaacactatttttgtacaatctgcgtttggatatttggagcgctttgatgcctatggtggaaaacaaaatatccgcacataaaatctggacagcagcattctcagaaacttgtttgtgttgtgtgcattcaactcacagagttgaacctttcctttgattgagcagttttgaaaaagtctttttgtagaatccacaagtggatatttggagcagtttgaggcctatggtgtaaaaggaaatatcttcacataaaaactagacagaagcattctcagaaacttctttgtgttgtgtgcattcaactcacagagttgaacttttcctatgattgagcagttttgaaacactctttctgaagaatctgcaagtggatatttggagcgctttgaggcctgtggtggaaaaagaaacaccttcacaaaaaaactagagcagaagcattctcagaaacttctttgtgatgtgtgcattcaactcacagagttgaacctttctttgatagagcagttttgaaacactctttttgtagaatctgcaattggatatttggagctctttgatgcctatggtggaaaaggaaatatccgcacataaaaactagacagcagcattctcagaaacttgtttgtgttgtgtgcattcatctcacagagttgaaactttcctttgattgagcagttttgaaaaagtccttttgcagaatctgcaagtggatatttggaggctttgaggcctatggtgtaaaaggaaatatcttcacatagaaactagacagaagcattctctgaaacttctttgtgatgtgtgcattcaactcacagagttgaacctttcttttgtagagcagttttgaaacactttttttgtagaatctgcaattggatatttggagctctttgatgcctatggtgggaaaggaaatatccgcacataaaaagtagatagcagcattctcagaaacttgtttgtgttgtgtgcattcaactcacagagttgaacctttcctttgattgagcagttttgaaaaagtctttttgtagaatctacaagtggatatttgaagcacattgaagcctatgatggaaaaggaaatatcttcacatacaaactagacagaagcattctcagaaacttctttgtgataagtgcattcaactcacagagataaacctttctgttgatagagcagttttaaaacactctttttctggaatcggaaagtggatatttggagtgctttgaggcctatagtggaaaaggaaacaccttcacaaaataactagagcagaagcattctcagaaacttctttgtgatttgtgcattcaactcacagagttgaacctttctttgatagagcagttttgaaacactctttttgtagaatctgcaattggatatttggagctctttgatgcctatggtgggaaaggaaatatccacacatataaactagacagcagcattctccgaaacttgtttgtgttgtgtgcattcaactcacagagttgaacctttctttcgtagagcagttttgaaacactctttttgtagaatctgcaagtagatatttggagcgctttgaggcttatggtgcaaaaggaaatatcttcacatacaaactagacagaagcattctcagaaacttctttgtgatgagtgcattcaactcacagagttggacctttctgttgatagagcagttttaaaacactctgtttctggaatccgaaagtggatatttggagtgctttgaggcctatgttggaaaaggaaatatcttcacataaaaactagacagaagcattctcagaaacttctttgtgctaggtgcattcaactcacatagttgaacctttctattgatagagcagttttgaaacactctttttgtagtatctgccagtgattatttggagtgctttgaggcctacggtggaaatggaaatatcttcaaataaaaactaggcagaagcattgtcagtaactaatttgtgttgtgtgcattcaactctcagagttgtatttttcctttgattgagcagttttgaaacactctttttgtagaatctgcaagtggatatttggagcgctttgaggcctatggtggaaaaggaaacaccttcacaaaaaaactggagcagaaacattctcagaaacgtctttgtgatgtgtgcattcaactcacagagttgaacctttctttgatagagcagttttgaaacactctttttgtagaatctgcagttggatatttggagcgctttgatgcctatggaggaaaaggaaatatccgcacataaaaactagacagcagcattctcagaaacttgtttgtgatgtgtgcattcaactcacagagttgacgtttcctttgattgagcagttttgaaaaagtctttttgcagaatctgcaagtggatatttggagcggtttgaggcctatggtgtaaaaggaaatatcttcacataaaaactagagagaagtattctcagaaagttctttgcgatgtgtgaattcaactcacagagttgaacctttctttcgtagagcagttttgaaacactctttttgtagaatctgcaagtagatatttggagcgctttgaggcttatagtggaaaaggaaatatcttcacataaaaactagacagaagcattctcagaaacttctttgtgataagtgcattcaactcacagagtcgaacctttctgttgatagagcagttttaaatcactctttttctagaatctgaaagtggatatttggagtgctttgaggcctatggtggaaaaggaaatacctacacataaaaactaggcgtaagcattctcagaaatatctttgtgatgagtgcattcaactcacagagttgaacatttatgttgatagaggagttttaaaacactctttttcaggaatctgaaagtggatatttggagcgctttgaggcctatggtggaaaaggaaacaccttcacaaaaaaaactagagcagaagcattctcagaaagttctttgtgttgtgtgcattcaattcacagagttgaacctttttttttgatagagcagttttgaaacactatttttgtacaatctgcggttggatatttggagcgctttgatgcctatggtggaaaacgaaatatccgcacataaaatctagacagcagcattctcagaaacttgtttgtgttgtgtgcattcaactcacagagttgaacctttcctttgattgagcagttttgaaatagtctttttgtagaatccacaagtggatatttggagcagtttgaggcctatggtgtaaaaggaaatatcttcacataaaaactagacagaagcattctcagaaacttctttgtgttgtgtgcattcaactcacagagttgaacttttcctatgattgagcagttttgaaacactctttctgaagaatctgcaagtggatatttggagcgctttgaggcctacggtggaaaaggaaacaccttcacaaaaaaactagagcagaagcattctcagaaacgtctttgtgatgtgtgcattcaactcacagagttgaacctctctttgatagagcagttttgaaacactctttttgtagaatctgcagttggagatttggagcgctttgatgcctatggtggaaaaggaaatatccgcacataaaaactagacagcagcattctcagaaacttgtttgtgttgtgtgcattcaactcacagagttgacctttcctttgattgagcagttttgaaaaagtctttttgcagaatctgcaagtagatatttggagcggtttgaggcctatggtgtaaaaggaaatatcttcacataaaaactagacagaagcattctctgaaacttctttgtgatgtgtgaattcaactcacagggttgaacctttcttttgtagagcagttttgaaactctttttgtagaatctgtaagtagatatttggagcgctttgaggcttatggtggaaaaggaaatatcttcacatgaaaactagacagaagcattctcagaaacttctttgtgataagtgcattctactcacagagtcgaacctttctgttgatagagcagttttaaatcactctttttctagaatctgaaagtggaaatttggagtgctttgaggcctatggtggaaaaggaaatacctacacataaaaactaggcgtaagcattctcagaaatatctttgtgatgagtgcattcaactcacagagttgaacaattatgttgatagaggagttttaaaacactctttttcagaaatctgaaagtggatatttggagcgctttgaggcctatggtggaaagggaaacaccttcacaaaaaaaactagagcagaagcattctcagaaacttctttgtgatgtgtgcattcaactcacagagttgaacctttttttttgatagagcagttttgaaacactatttttgtacaatctgcggttggatatttggagcgctttgatgcctatggtggaaaacgaaatatccgcacataaaatctagacgagcagcattctcagaaacttgtttgtgttgtgtgcattcaactcacagagttgaacctttcctttgattgagcagttttgaaaaagtctttttgtagaatccacaagtggatatttggagcagtttgaggcctatggtgtaaaaggaaatatcttcacaaaaaaactagagcagaagcattctcagaaaattctttgtgttgtgtgcattcaactcacagagttgaacttttcctatgattgagcagttttgaaacactctttctgaagaatctgcaagtggatatttggagcgctttgaggcctatggtggaaaaggaaacaccttcacaaaataactagagcagaagcattctcagaaacgtctttgtgatgtgtgcattcaactcacagagttgaacctttctttgatagagcagttttgaaacactctttttgtagaatctgcagttggatatttggagcgctttgatgcctatggtggaaaaggaaatatccgcacataaaaactagacagcagcattctcagaaacttgtttgtgttgtgtgcattcaactcacagagttgacctttcctttgattgagcagttttgaaaaagtctttttgcagaatctgcaagtggatatttggagcggtttgaggcctatggtgtaaaaggaaatatcttcacataaaaactagacagaagcattctctgaaacttctttgtgatgtgtgaattcaactcacagagttgaacctttcttttgtagagcagttttgaaactctttttgtagaatgtgtaagtagatatttggagcgctttgaggcttatggtggaaaaggaaatatcttcacataaaaactagacagaagcattctcagaaacttctttgtgataagtgcattcaactcacagagtcgaacctttctgttgagagagcagttttaaatcactctttttctagaatctgaaagtggatatttggagtgctctgaggcctatggtggaaaaggaaatacctacacataaaaactaggcggaagcattctcagaaatatctttgtgatgagtgcattcaactcacagagttgaacatttatgttgatagaggagttttaaaacactctttttccggaatctgaaagtggatatttggagggctttgaggcctatggtggaaaaggaaacaccttcacaaaaaaaaactagagcagaagcattctcagaaacttcgttgtgatgtgtgcattcaactcacagagttgaacctttttatttgatagagcagttttgaaacactatttttgtacaatctgcggttggatatttggagcgctttgatgcctatggtggaaaacgaaatatccgcacataaaatctagacagcagcattctcagaaacttgtttgtgttgtgtgcattcagctcacagagttgaacctttcctttgattgagcagttttgaaatagtctttttgtagaatccacaagtggatatttggagcagtttgaggcctatggtgtaaaaggaaatatcttcacataaaaactagacagaagcattctcagaaacttctttgtggtgtgtgcattcaactcacagagttgaacttttcctatgattgagcagttttgaaacactctttctgaagaatctgcaagtggatatttggagcgctttgaggcctatggtggaaaaggaaacaccttcacaaaaaaactagagcagaagcattctcagaaacgtctttgtgatgtgtgcattcaactcacagagttgaacctttctttgatagagcagttttgaaacactctttttgtagaatctgcagttggatatttggagcgctttgatgcatatggtggaaaaggaaatatccgcccataaaaactagacagcagcattctcagaaacttgtttgtgttgtgtgcatttaactcacagagttgagctttcctttgattgagcagttttgaaaatgtctttttgcagaatctgcaagtggatatttggagcagtttgaggcctatggtgtaaaaggaaatatcttcacataaaaactagacagaagcattctctgaaacttctttgtgatgtgtgaattcaactcacagagttgaacctttcttttgtagagcagttttgaaactctttgtgcagaatctgtaagtagatatttggagcgctttgaggcttatggtggaaaaggaaatatcttcacataaaaactagacagaagcattctcagaaacttctttgttataagtgaattcaactcacagagtcgaacctttctgttgatagagcagttttaaatcactctttttctagaatctgaaagtggatatttggagtgctttgaggcctatggtggaaaaggaaatacctacacataaatactaggcagaagcattctcagaaatatctttgtgatgagtgcattcaactcacagagtcgaacacttatgttgatagaggagttttaaaacactctttttcaggaatctgaaagtggatatttggagcgctttgaggcctactgtggaaaaggaaacaccttcacaaaaaaaactagagcagaagcattctcagaaacttctttgtgatgtgtgcattcaactcacagagttgaacctttttttttcatagagcagttttgaaacactatttttgtacaatctgcggttggatatttgtagcgctttgatgcctatggtggaaaacgaaatatccgcacataaaatctagacagcagcattctcagaaacttgtttttgttgtgtgcattcaactcagatagttgaacctttcctttgattgagcagttttgaaaaagtctttttgtagaatccacaagtggatatttggagcagtttgaggcctatggtgtaaaaggaaatatcttcacataaaaactagacagaagcattctcagaaacttctttgtgttgtgtgcattcaactcacagagttgaacttttcctatgattgagcagttttgaaacactctttctgaagaatctgcaagtggatatttggagcgctttgaggcctatggtggaaaaggaaacaccttcacaaaaaaactagagcagaagcattctcagaaacgtctttgtgatgtgtgcattcaactcacagagttgaacctttctttgatagagcagttttgaaacactctttttgtagaatctgcagttggatatttggagcgctttcatgcctatggtggaaaaggaaatatccgcacataaaaactagacagcagcattctcagaaacttgtttgtgttgtgtgcattcaactcacagtgttgagctttcctttgattgagcagttttgaaaatgtctttttgcagaatctgcaagtggatatttggagcggtttgaggcctatggtgtaaaaggaaatatcttcacataaaaaccagacagaaggattctctgaaacttgtttgtgatgtgtgaattcaactcgcagagttgaacctttcttttgtagagcagttttgaaactctttttgtagaatctgtacgtagatatttggagcgctttgaggcttatggtggaaaaggaaatatcttcacataaaaactagacagaagcattctcagaaacttctttgtgataagtgcattcaactcacagagtcgaacctttctgttgatagaacagttttaaatcactctttttctagaatctgaaagtggatatttggagtgctttgaggcctatggtggaaaaggaaatacctacacataaaaactaggcggaagcattctcagaaatatctttgtgatgagtgcattcaactcaaagagttgaacatttatgttgatagaggagttttaaaacactctttttccggaatctgcaagtggatatttgtagcgctttgaggcctatggtggaaaaggaaacaccttcacaaaaaaaactagagcagaagcattctcaggaacttctttgtgatgtgtgcattcaactcacagagttgaaactttttttttgatagagcagttttgaaacactatttttgtacaatctgcggttggatatttggagcgctttgatgcctatggtggaaaacgaaatatccgcacataaaatctagacagcagcattctcagaaacttgtttgtgttatgtgcattcaactcacagagttgaaccttacctttgattgagcagttttgaaaaagtctttttgtagaatccacaagtggatatttggagcagtttgaggcctatggtgtaaaaggaaatatcttcacataaaaactaggcagaagcattctcagaaacttctttgtgttgtgtgcattcaactcacagagttgaacttttcctatgattgagcagttttgaaacactctttctgaagaatctgcaagtggatatttggagcgctttgaggcctatggtggaaaaggaaacaccttcacaaaaaaactagagcagaagcattctcagaaacgtctttgtgatgtgtgcattcaactcacagagttgaacctttctttgatagagcagttttgaaacactctttttgtagaatctgcagttggatatttggagcgctttgatgcctatggtggaaaaggaaatatccgcacataaaaactagacagcagcattctcagaaacttgtttgtgttgtgtacattcaactcacagagttgacctttcctttgattgagcagttttgaaaaagtctttttgcagaatctgcaagtggatatttggagcggtttgaggcctatggtgtaaaaggaaatatcttcacataaaaactagacagaagcattctctgaaacttctttgtgatgtgtgaattcaactcacagagttgaacctttcttttgtagagcagttttgaaactctttttgtagaatctgtaagtagatatttggagcgctttgaggcttatggtggaaaaggaaatatcttcacataaaaactagacagaagcattctcagaaacttctttgtgataagtgcattcaactcacagagtcaaacctttctgttgatagagcagttttaaatcactctttttctagaatctgaaagtggatatttggtgtgctttgaggcctatggtggaaagggaaatacctacacataaaaactatgcggaagcattctcagaaatatctttgtgatgagtgcattcaactcacagagttgaacatttatgttgatagaggagttttaaaacactctttttcaggaatctgcaagtggatatttggagcggtttgaggcctatggtgtaaaaggaaatatcttcacgtaaaaactagacagaagcattctctgaaacttctttgtgatgtgtgaattcaactcgcagagttgaacctttcttttgtagagcagttttgaaactctttttgtagaatctgtaagtagatatttggagcgctttgagtcttatggtggaaaaggaaatatcttcacataaaatctagacagaagcattctcagaaacttctttctgataagtgcattcaactcacagagtcgaacctttctgttgatagagcagttttaaatcactctttttctagaatctgaaagtggatatttggagtgctttgaggcctatggtggaaaaggaaatacctacccataaaaactaggcggaagcattctcagaaatatctttgtgatgagtgcattcaactcacagagttgaacatttatgttgatagaggagttttaaaacactctttttcaggaatctgaaagtggatatttggagcgctttgaggcctatggtggaaaaggaaacaccttcagaaaaaaaaactagagcagaagcattctcaggaacttctttgtgatgtgtgcattcaactcacagagttgaaccttttttttttgatagagcagttttgaaacactatctttgtacaatctgcggttggatatttggagcgctttgatgcctatggtggaaaacgaaatatccgcacataaaatctagacagcagcattctcagaaacttgtttgtgttgtgtgcattcagctcccagagttgaacctttcctttgattgagcagtttgaaaaagtctttttgtagaatccacaagtggatatttggagcagtttgaggcctatgttgtaaaaggaaatatcttcacataaaaactagacagaagcattctcagaaacttctttgtgttgtgtgcattcaactcacagagttgaacttttcctatgattgagcagttttgaaacactctttctgaagaatctgcaagtggatatttgtagcgctttgaggcctatggtggaaaaggaaacaccttcacaaaaaaactagagcagaagcattctcagaaacgtctttgtgatgtgtgcattcaactcacagagttgaacctctctttgatagagcagttttgaaacactctttttgtagaatctgcagttggagatttggagcgctttgatgcctatggtggaaaaggaaatatccgcacataaaaactagacagcagcattctcagaaacttgtttgtgttgtgtgcattcaactcacagagttgacctttcctttgattgagcagttttgaaaaagtctttttgcagaatctgcaagtggatatttggagcggtttgaggcctatggtgtaaaaggaaatatcttcacataaaaactagacagaagcattctctgaaacttctttgtgatgtgtgaattcaactcacagagttgaacctttcttttgtagagcagttttgaaactctttttgtagaatctgtaagtagatatttggagcgctttgaggcttatggtggaaaaggaaatatcttcacataaaaacttgacagaagtattctcagaaacttctttgtgataagtgcattcaactcacagagtcgaacctttctgttgatagagcagttttaaatcactctttttctagaatctgaaagtggatatttggagtgctttgaggcctatggtggaaaaggaaatacctacacataaaaactaggcggaagcattctcagaaatatctttgtgatgagtgcattcacctcacagagttgaacatttatgttgatagaggagttttaaaacacactttttcgggaatatgaaagtggatatttggagcgctttgaggcctatggtggaaaaggaaacaccttcacaaaaaaaactagagcagaagcattctcagaaagttctttgtgatgtgtgcattcaactcacagagttgaacctttttttttgatagagcagttttgaaacactatttttgtacaatctgcggttggatatttggagcgctttgatgcctatggtggaaaacgaaatatccgcacataaaatctagacagcagcattctcagaaacttgtttgtgttgtgtgcattcaactcacagagttgaacctttcctttgattgagcagttttgaaaaagtctttttgtagaatccacaagtggatatttggagcagtttgaggcctatggtgtaaaaggaaatatcttcacataaaaactagacagaagcattctccgaaacttctttgtgttgtgtgcattcaactcacagagttgaacttttcctatgattgagcagttttgaaacactctttctgaagaatctgcaagtggatatttggagcgctttgaggcctatggtggaaaaggaaacaccgtcacaaataaaactagagcagaagcattctcagaaacgtctttttgatgtgtgcattcaactcacagaattgaacctttctttgatagagcagttttgaaacactctttttgtagaatctgcagttggatatttggagcgctttgatgcctatgttggaaaaggaaatatccgcacataaaaactagacagcagcattctcagaaacttgtttgtgttgtgtgcattcatctcacagagttgaaactttcctttgattgagcagttttgaaaaagtccttttgcagaatctgcaagtggatatttggaggctttgaggcctatggtgtaaaaggaaatatcttcacatagaaactagacagaagcattctctgaaacttctttgtgatgtgtgaattcaactcacagagttgaacctttcttttgtagagcagttttgaaactctttttgtagaatctgtaagtagatatttggagcgctttgaggcttatggtggaaaaggaaatatcttcacataaaaactagacagaagcattctcagaaacttctttgtgataagtgcattcaactcacagagtcgaacctttctgttgatagagcagttttaaatcactctttttctagaatctgaaagtggataattggagtgctttgaggcttatggtggaaaaggaaatacctacacataaaaactaggcgtaagcattctcagaaatatctttgtgatgagtgcattgaactcaaggagttgaacatttatgttgatagaggagttttaaaacactctttttcaggaatctgaaagtggatatttggagcgctttgaggcctatggtggaaaaggaaacaccttcacaaaaaaaactagagcagaagcattctcagaaacttctttgtgatgtgtgcattcaactcacagagttgaacctttttttttgatagagcagttttgaaacactatttttgtacaatgtgcggttggatgtttggagcgctttgatgcctatggtggaaaacgaaatatccgcacataaaatctagacagcagcattctcagaaacttgtttgtgttgtgtgcattcagctcccagagttgaacctttcctttgattgagcagtttgaaaaagtctttttgtagaatccacaagtggatatttggagcagtttgaggcctatgttgtaaaaggaaatatcttcacataaaaactagacagaagcattctcagaaacttctttgtgataagtgcattcaactcacagagttgaacctttctgttgatagagcagttttaaaacactctttttctggattgggaaagtggatatttggagcactttgaggcctatagtggaaaaggaaacaccttcacaaaataactagagcagaagcattctcagaaaattctttgtgatttgtgcattcaactcagagttaaacctttctttgatagagcagttttgaaacactctttttgtagaatctgcaattggatatttagagctctttgatgcctatggtgggaaaggaaatatccgcatataaaaagtagacagcagcattctcagaaccttgtttgtgttgtgtgcattcaactcacagagttgaacttttcctttgattgagcagttttgaaaaagtctttttgtagaatctacaagtggatatttggagcagtttgaggtctatggtgtaaaaggaaatatcttcacatgaaaactagacagaagcattctcagaaacttctttgtgatgagttcattcaattcacatagttgaacatttcttttgatagagcagttttgaaacactctttctgtagaatctacaagtggatatttggagcacattgaagcctatgatggaaaaggaaatatcttcacatacaagctagacagaagtattctcagaaacttctttgtgataagtgcattcaactcactgagtcgaacctttctgttgatagagcagttttaaatcactctttttctagaatctgaaagtggatatttggagtgctttgaggcctatggtggaaaaggaaatacctacacataaaaactaggcggaagcattctcagaaatatctttgtgatgagtgcattcaactcacagagttgaacacttatgttgatagaggagttttaaaacactctttttcaggaatctgaaagtggatatttggagcgctttgaggcctatggtggaaaaggaaacaccttcacaaaaaaactagagcagaagcattctcagaaacttcgttgtgatgtgtgcattcaactcacagagttgaaactttttatttgatagagcagttttgaaacactatttttgtacaatctgcggttggatatttggagcgctttgatgcctatggtggaaaacgaaatatccgcacataaaatctagacagcagcattctcagaaacttgtttgtgttgtgtgcattcagctcacagagttgaacctttcctttgactgagcagttttgaaatagtctttttgtagaatccacaagtggatatttggagcagtttgaggcctatggtgtaaaaggaaatatcttcacataaaaactagacagaagcattctcagaaactgttttgtgttgtgtgcattcaactcacagagttgaacttttcctatgattgagcagttttgaaacactctttctgaagaatctgcaagtggatatttggagcgctttgaggcctatggtggaaaaggaaacaccttcacaaaaaaactagagcagaagcattctcagaaacgtctttgtgatgtgtgcattcaactcacagagttgaacctttctttgatagagcagttttgaaacactctttttgtagaatctgcagttggatatttggagcgctttgatgcctatggtggaaaaggaaatatccgcacataaaaactagacagcagcattctcagaaacttgtttgtgttgtgtgcattcaactcacagagttgagctttcctttgattgagcagttttgaaaaagtctttttgcagaatctgcaagtggatatttggagcggtttgaggcctatggtgtaaaaggaaatatcttcacataaaaactagacagaagcattctctgaaacttctttgtgatgtgtgaattcaactcacagagttgaacctttcttttgtagagcagttttgaaactctttttgtagaatctgtaagtagatatttggagcgctttgaggcttatggtggaaaaggaaatatcttcacataaaaactagacagaagcattctcagaaacttctttgtgataagtgcattcaacccacagagtcgaacctttctgttgatagagcagttttaaatcactctttttctagaatctgaaagtggatatttggagtgctttgaggcctatggtggaaaacgaaatacctacacataaaaactaggcggaagcattctcagaaatatctttgtgatgagtgcattcaactcacagagttgaacatttatgttgatagaggagttttaaaacactctttttcaggaatctgaaagtggatatttggagcgctttgaggcctatggtggaaaaggaaacaccttcacaaaaaaaactagagcagaagcatcctcaggaacttctttgtgatgtgtgcattcaactcacagagttgaaccttttttttggatagagcagttttgaaacactatttttgtacaatctgcggttggatatttggagcgctttgatgcctatggtggaaaacgaaatatccgcatataaaatctagacagcagcattctcagaaacttgtttgtgttgtgtgcattcaactcacagagttgaacctttcctttgattgagcagttttgaaaaagtctttttgtagaatccacaagtggatatttggagcggtttgaggcctatggtgtaaaaggaaatatcttcacataaaaactagacagaagtattctcagaaacttctttgtgttgtgtgcattcaactcacagagttgaacttttcctatgattgagcagttttgaaacactctttctgaagaatctgcaagtggatatttgcagcgctttgagacctatggtggaaaaggaaacaccttcacaataaaactagagcagaagcattctcagaaacgtctttttgatgtgtgcattcaactgacagtgttgaacctttctttgatagagcagttttgaaacactctttttgtagaatctgcagttggatatttggagcgctttgatgcctatggtggaaaaggaaatatccgcacataaaaactagacagcagcattctcagaaacttgtttgtgttgtgtgcattcaactcacagagttgacctttcctttgattgagcagttttgaaaaagtctttttgcagaatctgcaagtggatatttggagcggttggaggcctatggtgtaaaaggaaatatcttcacataaaaactagacagaagcattctctgaaacttctttgtgatgtgtgaattcaactcacagagttgaacctttcttttgtagagcagttttgaaactctttttgtagaatctgtaagtagatatttggagtgctttgaggcttatggtggaaaaggaaatatcttcacataaaaactagacagaagcattctcagaaacttctttgtgataagtgcattcaactcacagagtcgaacctttctgttgatagagcagttttaaatcactctttttctagaatatgaaagtggatatttcgaatgctttgaggcctatggtggaaaaggaaatacctacacataaaaactaggcggaagcattctcagaaatatctttgtgatgagtgcattcaactcacagagttgaacatttatgttgatagaggagttttaaaacactctttttcgggaatctgaaagtggatatttggagcgctttgaggcctatggtggaaaaggaaacaccttcacaaaaaaaactagagcagaagcattctcagaagattctttgtgatgtgtgcattcaactcacagagttgaaactttttttttgatagagcagttttgaaacactatttttgtacaatctgcggttggatatttggagcgctttgatgcctatggtggaaaacgaaatatccgcacataaaatctagacagcagcattctcagaaacttgtttgtgttgtgtgcattcagctcacagagttgaacctttcctttgattgagcagttttgaagaagactttttgtagaatccacaagtggatatttggagctgtttgaggcctatggtgtaaaaggaaatatcttcacataaaaactagacagaagcattctcagaaacttcttgtattgtgtgcattcaactcacagagttgaacctttttatttgatagagcagctttgaaacactatttttgtacaatctgcgtttggatatttggagcgctttgatgcctatggtggaaaacaaaatatccgcacataaaatctggacagcaacattctcagaaacttgtttgtgttgtgtgcattcagctcacagagttgaacctttcctttgattgagcagttttgaaaaagtctttttgtagaatccacaagtggatatttggagcagtttgaggcctatggtgtaaaaggaaatatcttcacataaaaactagacagaagcattctcagaaacttctttgtgttgtgtgcattcaactcacagagttgaacttttcctatgattgagcagttttgaaacactctttctgaagaatctgcaagtggatatttggagcgctttgaggcctatggtggaaaaggaaacaccttcacaaaaaaactagagcagaagcattctcagaaacgtctttgtgatgtgtgcattcaactcacagagttgaacctttctttgatagagcagttttgaaacactctttttgtagaatctgcagttggatatttggagcgctttgatgcctatggtggaaaaggaaatatccgcacataaaaagtagacagcagcattctcagaaacttgtttgtgttgtgtgcattcaactcacagagttgacctttcctttgattgagcagttttgaaaaagtctttttgcagaatctgcaagtggatatttggagcgttttgaggcctatggtgtaaaaggaaatatcttcacataaaaactagacagaagcattctctgaaacttctttgtgatgtgtgaattcaactcacagagttgaacctttcttttgtagagcagttttgaaactctttttgtagaatctgtaagtagatatttggagcgctttgaggcttatggaggaaaaggaaatatcttcacataaaaactagacagaagcattctcagaaacttctttgtgataagtgcattcaactcacagagtcgaaactttctgttgatagagcagttttaaatctctctttttctagaatctgaaagtggatatttggagtgctctgaggcctatggtggaaaaggaaatacctacccataaaaactaggcggaagcattctcagaaatatctttgtgatgagtgcattcaactcacagagttgaacatttatgttgatagaggagttttaaaacactctttttcaggaatctgaaagtggatatttggagcgctttgaggcctatggtggaaaaggaaacaccttcacaaaaaaaaactagagcagaagcattctcagaaacttctttgtgatgtgtgcattcaactcacagagttgaacctttttatttgatagagcagttttgaaacactatttttgtacaatctgtggttggataattggagcgctttgttgcctatggtggaaaacgaaatatccgcacataaaatctagacagcagcgttctcagaaacttgtttgtgttgggtgcattcaactcacagagttgaacctttcctttgattgagcagttttgaaaaagtctttttgtagaatccacaagtggatatttggagcagtttgaggcctatggtgtaaaaggaaatatcttcacataaaaactagacagaagcattctcagaaacttctttgtgttgtgtgcattcaactcacagagttgaacttttcctatgattgagcagttttgaaacactctttctgaagaatctgcaagtggatatttggagcgctttgaggcctatggtggaaaaggaaacatcttcacaaaaaaaactagagcagaagcattctcagaaacgtctttgtgatgtgtgcattcaactcacagagttgaacctttctttgatagagcagttttgaaacactctttttgtagaatctgcagttggatatttggagcgctttgatgcctatggtggaaaaggaaatatccgcacataaaaactaggcaacagcattctcagaaacttgtttgtgttgtgtgcattcaactcacagagttgagctttcctttgattgagcagttttgaaaaagtctttttgcagaatctacaagtggatatttggagcggtttgaggcctatggtgtaaaaggaaatatcttcacataaaaactagacagaagcattctctgaaacttctttgtgatgtgtgaattcaactcacggagttgaacctttcttttgtagagcagttttgaaactctttttgtagaatctgtaagtagatatttggagcgctttgaggcttatggtggaaaaggaaatatcttcacataaaaactagacagaagcattctcagaaacttctttgtgataagttcattcaactcacggagtcgaacctttctgttgatagagcagttttaaatcactctttttctagaatctgaaagtggatatttggagtgctctgaggcctatggtggaaaaggaaatgcctacacataaaaactaggcagaagcattctcagaaatatctttgtgatgagtgcattcaactcacagagttgaacatttatgttgatagaggagttttaaaacactctttttcaggaatctgaaagtggatatttggagcgctttgaggcctatggtggaaaaggaaacaccttcacaaaaaaaactagagcagaagcattctcagaaacgtctttgtgatgtgtgcattcaactcacagagttgaacctttttttttgatagagcagttttgaaacactatttttgtacaatctgcggttggatatttggagcgctttgatgcctatggtggaaaacgaaatatccgcacataaaatctagacagcagcattctcagaaacttgtttgtgttgtgtgcattcaactcacagagttgaacctttcctttgattgagcagttttgaaaaagtctttttgtagaatccacaagtggatatttggagcactttgaggcctatggtgtaaaaggaaatatcttcacataaaaactagacagaagcattctcagaaacttctttgtgttgtgtgcattcaactcatagagttgaacttttcctatgattgagcagttttgaaacactctttctgaagaatctgcaagtggatatttggagcgctttgaggcctatggtggaaaaggaaacaccttcacaaaaaaactagagcagaagcattctcagaaacttctttgtgatgtgtgcattcaactcacagagttgaacctttctttgattgagcagttttgaagcactctttttgtagaatctgcaattggatatttggagctctttgatgcctatggtgggaaaggaaatatccgcatataaaaagtagacagcagcattctcagaaacgtgtttgtgttgtgtgcattcaactcacagagttggactttcctttgattgagcagttttgaaaatgtctttttgcagaatctgcaagtggatatttggagcggtttgaggcctatggtgtaaaaggaaatatcttcacataaaacgtagacagaagtattctcagcaacttctttgtgatgagttcattcaattcagatagttgaacatttctttcgtagagcagttttgaaacactctttttgtagaatctgcaagtggatatttggagcacactgaagcctatggtggaaaaggaaatatcttcacttaaaagctagacagaagcattctcagaaacttctttgtgataagtgcattcaactcaccgagtcgaacctttctgttgatagagcagttttaaatcactctttttctataatctgaaagtggatatttggagtgctctgaggcctatggtggaaaaggaaatacctacacataaaaactaggcggaagcattctcagaaatatctttgtgatgagtgtattcaactcacagagttgaacatttatgttgatagaggagttttaaaacactctttttcaggaatctgaaagtggatatttggagcgctttgaggcctatggtggaaaaggaaacaccttcacaaaaaaaaactagagcagaagcattctcaggaacttctttgtgatgtgtgcattcaactcacagagttgaacctttttttttgatagagcagttttgaaacactatttttgtacaatctgcggttggatatttggagcgctttgatgcctatggtggaaaacgaaatatccgcacataaaatctagacagcagcattctcagaaacttgtttgtgttgtgtgcattcagctcacagagttgaacctttcctttgattgagcagttttgaaatagtctttttgtagaatccacaagtggatatttggagcagtttgaggcctatggtgtaaaaggaaatatcttcacataaaaactagacagaagcattctcagaaacttctttgtgttgtgtgcattcaactcacagagttgaacttttcctatgattgagcagttttgaaacactctttctgaggaatctgcaagtggatatttggagcgctttgatgcctatggtggaaaaggaaacaccttcacaaaaaaactagagcagaagcattctcagaaacgtctttgtgatgtgtgcattcaactcacagagttgaacctttctttgatagagcagttttgaaacactctttttgtagaatctgcagttggatatttggagcgctttgatgcctatggtggaaaagtaaatatccgcacataaaaactagacagcagcattctcagaaacttgtttgtgttgtgtgcattcaactcacagagttgaaactttcctttgattgagcagttttgaaaaagtccttttgcagaatctgcaagtggatatttggagcgtttgaggcctatggtgtaaaaggaaatatcttcacataaaaactagacagaagcattctctgaaacttctttgtgatgtgtgaattcaactcacagagttgaacctttcttttgtagagcagttttgaaactctttttgtagaatctgtaagtagatatttggagcgctttgaggcttatggtggaaaaggaaatatcttcacataaaaactagacagagaagcattctcagaaacttctttgtgataagtgcattctactcacagagtcgaacctttctgttgatagagcagttttaaatcactctttttctagaatctgaaagtggatatttggagtgctttgaggcctatggtggaaaaggaaatacctacacataaaaactaggcggaagcattctcagaagtatctttgtgatgagtgcattcaactcacagagttgaacacttatgttgatagaggagttttaaaacactctttttcaggaatctgaaagtggatatttggagcactttgaggcctatggtggaaaaggaaacaccatcacaaaaaaaactagagcagaagcattctcagaaacttcgttgtgatgtgtgcattcaactcacagagttgaaactttttatttgatagagcagttttgaaacactatttttgtacaatctgtggttggatatttggagcgctttgatgcctatggtggaaaacgaaatatccgcacataaaatctagacagcagcattctcagaaacttgtttatgttgtgtgcattcaacttacagagttgaacctttcctttgattgagcagttttgaaaaagtctttttgtagaatccacaagtggatatttggagcagtttgaggcctatggtgtaaaaggacatatcttcacataaaaactagacagaagcattctcagaaacttctttgtgttgtgtgcattcaactcacagagttgaacttttcctatgattgagcagttttgaaacactctttctgaagaatctgcaagtggatatttggagcgctttgaggcctatggtggaaaaggaaacaccttcacaaaaaaactagagcagaagctttctcagaaacgtctttgtgatgtgtgcattcaactcacagagttgaacctttctttgatagagcagttttgaaacactctttttgtagaatctgcagttggatatttggagcgctttgatgcctatggtggaaaaggaaatatccgcacataaaaactagacagcagcattctcagaaacttgtttgtgttgtgtgcattcaactcacagagttgaacctttcctttgattgagcagttttgaaaaagtctttttgcagaatctgcaagtggatatttggagcggtttgaggcctatggtgtaaaaggaaatatcttcacataaaatctagacggaagcattctctgaaacttctttgtgatgtgtgaattcaactcgcagagttgaacctttcttttgtagagcagttttgaaaccctttttgtagaatctgtaagtagatatttggagcgctttgaggcttatggtggaaaaggaaatatcttcacataaaaactagacagaagcattctcagaaacttctttgtgataagtgcattcaactcacagagtcgaacctttctgttgatagagcagttttaaatcactctttttctagaatctgaaagtggatatttggagtgctttgaggcctatggtggaaaaggaaatacctacacataaaaactaggcgtaagcattctcagaaatatctttgtgatgagtgcattcaactcacagagttgaacatttatgttgatagaggagttttaaaacactctttttcaggaatctgaaagtggatatttggagcgctttgaggcctatggtggaaaaggaaacaccttcacaaaaaaaactagagcagaagcattctcagaaagttctttgtgatgtgtgcattcaactcacagagttgaatctttttttttgatagagcagttgtgaaacactatttttgtacaatctgcagttggatatttggagcgctttgatgcctatggtggaaaacgaaatatccgcacataaaatctagacagcagcattctcagaaacttgtttgtgttgtgtgcattcagctcacagagttgaacctttcctttgattgagcagttttgaaatagtctttttgtaggatccacaagtggatatttggagcagtttgaggcctatggtgtaaaaggaaatatcttcacataaaaactagacagaagcattctcagaaacttctttgtgttgtgtgcattcaactcacagagttgaacttttcctatgattgagcagttttgaaacactctttctgaagaatctgcaagtggatatttggagcgctttgaggcctatggtggaaaaggaaacaccttcacaaaaaaactagagcagaagcattctcagaaacgtctttgtgatgtgtgcattcaactcacagagttgaacctttctttgatagagcagttttgaaacactctttttgtagaatctgcagttggatatttggagcgctttgatgcctatggtggaaaaggaaatatccgcccataaaaactggacagcagcattctcagaaacttttttgtgttgtgtgcattcaactcacagtgttgagctttcctttgattgagcagttttgaaaatgtctttttgcagaatctgcaagtggatatttggagcggtttgaggcctatggtgtaaaaggaaatatcttcatataaaaaccagacagaagcattctctgaaacttctttgtgatgtgtgaattcaactcgcagagttgaacctttcttttgtagagcagttttgaaactctttttgtagaatctgtaagtagatatttggagcgctttgaggcttatggtggaaaaggaaatatcttcacataaaaactagacagaagcattctcagaaacttcgttgtcataagtgcattcaactcacagagtagaacctttctgttgatagagcagttttaaatcactctttttctagaatctgaaagtggatatttggagtgctctgaggcctatggtggaaaaggaaatacctacacataaaaactaggcggaagcattctcagaaatatctttgtgatgagtgcattcaactcacagagttgaacatttatgttgatagaggacttttaaaagactctttttcaggaatctgaaagtggatatttggagtgctttgaggcctatggtggaaaaggaaacaccttcacaaaaaaaactagagcagaagcattctctgaaacttctttgtgatgtgtgcattcaactcacagagttgcacctttttttttgatagagcagttttgaaacactatttttgtacaatctgcggttggatatttggagcgttttgatgcctatggtggaaaacgaaatatccgcacataaaatctagacagcagcattctcagaagcttgtttgtgttgtgtgcattcaactcacattgttgaacctttcctttgattgagcagttttgaaaaagtctttttgtagaatccacaagtggatatttggagcagtttgaggcctatggtgtaaaaggaaatatcttcacataaaaactagacagaagcattctcagaaacttctttgtgttgtgtgcattcaactcacagagttgaacttttcctgtgattgagcagttttgaaacactctttctgaagaatctgcaagtggatatttggagcgctttgaggcctatgctggaaaaggaaacaccttcacgaaaaaactagagcagaagcattctcagaaacgtctttgtgatgtgtgcattcaactcacagagttgaacctttctttgatagagcagttttgaaacactctttttgtagaatctgcagttggatatttggagcgctttgatgcctatggtggaaaaggaaatatccgcacataaaaactagacagcagcattctcagaaacttgtttgtgttgtgtgcattcaactcacagagttgacctttcctttgattgagcagttttgaaaaagtctttttgcagaatctgcaagtggatatttggagcggtttgaggcctatggtgtaaaaggaaatatcttcacataaaaactagacagaagcattctctgaaacttctttgtgatgtgtgaattcaactcgcagagttgaacctttcttttgtagagcagttttgaaactctttttgtagaacctgtaagtagatatttggagctctttgaggcttatggtggaaaaggaaatatcttcacataaaaactagacagaagcattctcagaaacttctttgtgataagtgcattcaacccacagagtcgaacctttctgttgatagagcagttttaaatcactctttttctagaatctgaaagtggatatttggagtgctttgaggcctatggtggaaaaggaaatacctacacataaaaactaggcggaagcattctcagaaatatctttgtgatgagtgcattcaactcacagagttgaacatttatgttgatagaggagttttaaaacactctttttcaggaatctgaaagtggatatttggagcgctttgaggcctatggtggaaaaggaaacaccttcacaaaaaaaactggagcagaagcattctcagaaacttctttctgatgtgtgcattcaactcaaagagttgaaactttttatttgatagagcagttttgaaacactatttttgtacaatctgcggttggatatttggagcgctttgatgcctatggtggaaaatgaaatatccgcacataaaatctagacagcagcattctcagaaacttgtttgtgttgtgtgcattcaactcacagagttgaacctttcctttgattgagcagttttgaaaaagactttttgtagaatccacaagtggatatttggagcagtttgaggcctatggtgtaaaaggaaatatcttcacataaaaactagacagaagcattctcagaaacttctttgtgttgtgtgcattcaactcacagagttgaacttttcctatgattgagcagttttgaaacaatctttctgaagaatctgcaagtggatatttggagcgctttgagacctatggtggaaaaggaaacaccttcacaagaaaaactagagcagaagcattctcagaaacgtctttgtgatgtgtgcattcaactcacagagttgaaaatttctttgatagagcagttttgaaacactctttttgtagaatctgcagttggatatttggagcgctttgatgcctatggtggaaaaggaaatatccgcacataaaaactagacagcagcattctcagaaacttgtttgtgttgtgtgcattcaactcacagagttgagctttcctttgattgagcagttttgaaaatgtctttttgcagaatctgcaagtggatatttggagcggtttgaggcctatggtgtaaaaggaaatatcttcacataaaaactagacagtagcattctctgaaacttctttgtgatgtgtgaattcaactcacagagttgaacctttttttgtagagcagttttgaaactctttttgtagaatctgtaagtagatatttggagcgctttgaggcttatgttggaaaaggaaatatcttcacataaaaactagacagaagcattctcagaaacttctttgtgataagtgcattcaactcacagagtcgaacctttctgttgatagagcagttttaaatcactctttttctagaatctgaaagtggatatttggagtgctctgaggtctatggtggaaaaggaaatacctacacataaaaaccaggcggaagcattctcagagatatccttgtgatgagtgcattcaactcacagagttgaacacttatgttgatagaggagttttaaaacactctttttcaggaatctgaaagtggatatttggagcgctttgaggcctatggtggaaaaggaaacaccttcacaaaaaaaactagagcagaagcattctcaggaacttctttgtgatgtgtgcattcaactcacagagttgaacctttttttttgatagagcagttttgaaacactatttttgtacaatctgcggttggatatttggagcgctttgatgcctatggtggaaaacgaaatatccgcacataaaatctagacagcagcattctcagaaacttgtttgtgttgtgtgcattcagctcacagagttgaacctttcctttgattgagcagttatgaaaaagtctttttgtagaatccacaagtggatatttggagcagtttgaggcctatggtgtaaaaggaaatatcttcacataaaaactagacagaagcattctcagaaacttctttgtgttgtgtgcattcaactcacagagttgaacttttcctatgattgagcagttttgaaacactctttctgaagaatctgcaagtggatatttggagcgctttgaggcctatggtggaaaaggaaacaccttcacaaaaaaactagagcagaagcattctcagaaacgtctttgtgatgtgtgcattcaactcacagagttgaacctttctttgatagagcagttttgaaacactctttttgtagaatctgcagttggatatttggagggctttgatgcctatggtggaaaaggaaatatccgcacataaaaactagacagcagcattctcagaaacttgtttgtgttgtgtgcattcaactcacagagttgacctttcctttgattgagcagttttgaaaaagtctttttgcagaatctgcaagtggatatttggagcggtttgaggcctatggtgtaaaaggaaatatcttcacataaaaactagacagaagcattctctgaaacttctttgtgatgtgtgaattcaactcacagagttgaacctttcttctgtagagcagttttgaaactctttttgtagaatctgtaagtagatatttggagcgctttgaggcttatggtggaaaaggaaatatcttcacataaaaactagacagaagcattctcagaaacttctttgtgataagtgcattcaactcacagagtcgaacctttctgttgatagagcagttttaaatcactctttttctagaatctgaaagtggatatttggagtgctgtgaggcctatggtggaaaaggaaatacctacacataaaaactaggcggaagcattctcagaaatatctttgtgatgagtgcattgaactcaaggagttgaacatttatgttgatagaggagttttaaaacactctttttcaggaatctgaaagtggatatttggagcgctttgaggcctatggtggaaaaggaaacaccttcacaaaaaaaactagagcagaagcattctcagaaacttctttgtgatgtgtgcattcaactcacagagttgaacctttttttttgatagagcagttttgaaacactatttttgtacaatctgcggttggatagttggagggctttgatgcctatggtggaaaacgaaatatccgcacataaaatctagacagcagcattctcagaaacttgtttgtgttgtgtgcattcaactcacagagttgaacctttcctttgattgagcagttttgaaaaagtctttttgtagaatccacaagtggatatttggagcagtttgaggcctatggtgtaaaaggaaatatcttcacataaaaactagacagaaggattctcagaaaattccttgtgttgtttgtattcaacccacagagtttaaacttttctttgattgggcagttttgaaacactctttttctagaatctgtaggtggatatttggagtgcttcgatgactacgggagaagaggaaatgtcttcatataaaaactagacagaagcattctcagaaacttccttgtgacgtgtgcattaaataacagtgttgaaccattgtttagaagagcattttggaaacacttcttttttttagaaaatgcaagtggatatttggagcgctttgtggcctatggtggaaaagaaaatatcttcacataaaaactagacagaagcattctcagaaacttgtttgtgttgtgtgcattcaactcacagagttgacctttcctttgattgagcagttttgaaaaagtctttttgcagaatctgcaagtggatatttggagcggtttgaggcctatggtataaaaggaaatatcatcacataaaaactagacagagcattctcagaaacttctttgagatgtgtgcattcaactcacagagctggtactttctgttcatagatcagttttgaaacactctttctgtagaatctgcaagtggatatttggtggatttgaggcctttggcagaaaaggaaatatcttcacataaaaactggacagatgcattctcagaaacttcttggtggtaagtccattcaactcagagagttgaaccttccttttgatagagcagttttgaaacactctttttttagaatctgcaagtgcatatttggagcgctttgaggcctatggtggtaaaggaaatatcttcacataaaaactagagagaagcattctcagaaatatctttgtgatgagtgcattcaactcacagagttgaacatttatgttgatagaggagttttaaaacactctttttcaggaatctgaaagtggatatttggagcgctttgaggcctatggtggaaaaggaaacaccttcacaaaaaaaactagagcagaagcattctcagaaacttctttgtgatgtgtgcattcaactcacagatttgaacctttttttttgatagagcagttttgaaacactgtttttgtacaatctgcggttggatatttggagcgctttgatgcctatggtggaaaacgaaatatccgcacataaaatctagacagcaacattctcagaaacttgtttgtgttgtgtgcattcaactcacagagttgaacctttcctttgattgagcagttttgaaaaagtctttttgtagaatccacaagtggatatttggagcagtttgaggcctatggtgtaaaaggaaatatcttcacataaaaactagacagaagcattctcagaaacttctttgtgttgtgtgcattcaactcacagagttgaacttttcctatgatttagcagttttgaaacactctttctgaagaatctgcaagtggatatttggagcgctttgaggcctatggtggaaaaggaaacaccttcacaaaaaaactagagcagaagcattctcagaaacttctttgtgttgtgtgcattcaactcacagagtggaacttttcctatgattgagcagttttgaaacactctttctgaagaatctgcagttggatatttggagcgctttgacgcctatggtggaaaaggaaatatccgcacataaaaactagacagcaacattctcagaaacttgtttgtattgtgtgcattcaactcacagagttgaacctttcctttgattgagcagttttgaaaaagtctttttgcagaatctgcaagtggatatttggagcagtttgaggcctatggtgtaaaaggaaatatcttcacataaaaactagacagaagcattctctgaaacttctttgtgatgtgtgaatttaactcacggagttgaacctttcttttgtagagcagttttcaaactctttttgtagaatctgtaaatagatatttggagcgctttgaggcttatggtggaaaaggaaatatcttcacataaaaactagacagaagcattctcagaaacttctttgtgataagttcattcaactcacagagtcgaacctttctgttgatagagcagttttaaatcactctttttctaggatctgaaagtggatatttggagtgctctgaggcctatggtggaaaaggaaatgcctacacataaaaactaggcggaagcattctcagaaatatctttgtgatgagtgcattcaactcaaagagttgaacatttatgttgatagaggagttttaaaacactctttttccggaatctgcaagtggatatttgtagcgctttgaggcctatggtggaaaaggaaacaccttcacaaaaaaaactagagcagaagcattctcagaaacttctttgtgatgtgtgcattcaactcacagagttgaatctttttttttgatagagcagttttgaaacactatttttgtacaatctgcggttggatatttggagctctttgatgcctatggtggaaaacgaaatatccgcacataaaatctagacagcagcattctcagaaacttgtttgtgttgtgtgcattcaactcacatagttgaacttttcctttgattgagcagttttgaaaaagtctttttgtagaatccacaagtggatatttggagcagtttgaggcctatggtgtaaaaggaaatatcttcacataaaaactagacagaagcattctcagaaacttctttgtgttgtgtgcattcaactcacagagttgaacttttcctatgattgagcagtgttgaaacactctttctgaagaatctgtaagtggatatttggagcgctttgaggcctatggtggaaaaggaaacaccttcacaaaaaaactagagcagaagcattctcagaaacgtctttatgatgtgtgcattcaactcacagagttgacacattctttgatagagcagttttgaaacactctttttgtggaatctgcagttggatatttggagcgctttgatgcctatggtggaaaaggaaatatccgcacataaaaactagacagcaaaattctcagaaacttctttgtgatgagtgcattcaactcacagagttggacatttctgttgatagagcagttttaaaacactctgtttctggaatccgaaagtggatatttggagcgctttgaggcctatgttggaaaaggaaatatcttcacataaaaactagacagaagcattctctgaaacttctttgtgatgtgtgaattcaacctcacagagttgaacctttcttttgtagagcagttttgaaactctttttgtagaatgtgtaagtagatatttggagcgctttgaggcttatggtggaaaaggaaatatcttcacataaaaactagacagaagcattctcagaaacttctttgtgataagtgcattcaacccacagagtcgaacatttctgttgatagagcagttttaaatcactctttttctagaatctgaaagtggatatttggagtgctttgaggctcatggtggaaaaggaaatacctacacataaaaactaggcggaagcattctcagaaatatctttgtgatgagtgcattcaactcacagagttgaacatttatgttgatagaggagttttaaaacactctttcaggaatctgaaagtggatatttggagcgctttgaggcctatggtggaaaaggaaacaccatcacaaaaaaaaactagagcagaagcattctcagaaagttctttgtgatgtgagcattcaactcacagacttgaatctttttttttgatatagcagttgtgaaacactatttttgtacaatctgcagttggatatttggagcgctttgatgcctatggtggaaaacgaaatatccgcacataaaatctagacagcaacattctcagaaacttgtttgtgttgtgtgcattcaactcacagagttgaacctttcctttgattgagcagttttgaaaaagtctttttgtagaatccacaagtggatatttggagcagtttgaggcctatggtgtaaaaggaaatatcttcacataaaaactagacagaagcattctcagaaacttctttgtggtgtgtgcattcaactcacagagttgaacttttcctatgattgagcagttttgaaacactctttctgaagtatctgcaagtggatatttggaacgctttcaggcctatggtggaaaaggaaacaccttcacaaaaaaactagagcagaagcattctcagaaacgtctttgtgatgtgtgcattcaactcacagagttgaacctttctttgatagagcagttttgaaacactctttttgtagaatctgcagttggatatttggagcgctttgatgcctatggtggaaaaggaaatatccgcccataaaaactagacagcagcattctcagaaacttgtttgtgttgtgtgcattcaactcacagagttgagctttcctttgattgagcagttttgaaaaagtctttttgcagaatctgcaagtggatatttggagcggtttgaggcctatggtgtaaaaggaaatatcttcacataaaaactagacagaagcattctctgaaacttctttgtgatgtgtgcattcaactcacagagttgaaccttccttttgacaaggtagttttgaaacagtctttttgtagtatctgcaagtggatatttggagtgctttgatgcctatggtggaaaaggaaatatcttcacataaaaactagacagaagcattctcagaaacttctttgtgataagtgcattcaactcacagagtcgaacctttctgttgatagagcagttttaaatcacactttttctagaatctgaaagtggatatttggagtgctttgaggcctatggtggaaaaggaaatacctacacataaaaactaggcggaagcattctctgaaatatctttgtgatgagtgcattcaactcacagagttgaacacttatgttgatagaggagttttaaaacactctttttcaggaatctgaaagtggatatttggagcgctttgaggcctatggtggaaaaggaaacaacttcacaaaaaaaactagagcagaagcattctcagaaacttcgttgtgatgtgtgcattcaactcacagagttgaaactttttatttgatagagcagttttgaaacactatttttgtacaatctgtggttggatatttggagcgctttgatgcctatggtggaaaacgaaatatccgcacataaaatctagacagctctgtctagtttttatatgaagatatttccttttctaccatatacctcaaagtgctccaaatgtccacttgcagattctacaaaaagagtgtttcaaaactgctctatgaaaaagaaagttcatatgtgccacattttcttaatccagtctatcattgttagacatttggtttagttccaagtctttgctattgtgaataatgccgcacatatacaccatggaatactatgcagccataaaaaatgataagttcatgtcctttgcagggacatggatgaaattggaaatcatcattctcagtaaactatcgcaagaacaaaaaaccaaacaccgcatattctcactcataggtgggaattgaacaatgagatcacatggacacaggaagaggaatatcacactccggggactgttgtggggtcgggggagggtgttgggatagcattgggagatatacctaatgttagatgacgagttattggggtgcagtgcaccagcatgtcacatnnnnnnnnnnnnnnnnnnnnnnnnnnnnnnnnnnnnnnnnnnnnnnnnnnnnnnnnnnnnnnnnnnnnnnnnnnnnnnnnnnnnnnnnnnnnnnnnnnnnagcattctcagaaacttctttgtgttgtgtgcattgaactcccagagttgaacgtttcctatgattgagcagttttgaaacactctttctgaagaatctgcaagtggatatttggagcgctttgaggcctacggtggaaaaggaaacaccttcacaaaaaaactagagcagaagcattctcagaaacgtctttgtgatgtgtgcattcaaatcacagagttgaacctttctttgatagagcagttttgaaacactctttttgtagaatctgcagttggatatttggagcgctttgatgcctatggtggaaaaggaaatatccgcacataaaaactagacagcagcattctcagaaacttgtttgtgttgtgtgcattcaactcacagagttgacctttcctttgattgagcagttttgaaaatgtctttttgcagaatctgcaagtggatatttggagcggtttgaggcctatggtgtaaaaggaaatatcttcacataaaaagtagacagaagcattctctgaaacttctttgtgatgtgtgaattcaacctcacagagttgaacctttcttttgtagagcagttttgaaactctttttgtagaatgtgtaagtagatatttggagcgctttgaggcttatggtggaaaaggaaatatcttcacataaaaactagacagaagcattctcagaaacttctttgtgataagtgcattcaactcacagagtcgaacctttctgtggatagagcagttttaaatcactctttttctagaatctgaaagtggatatttggagtgctttgagggctatggtggaaaaggaaatacctacacataaaaactatgcggaagcattctcagaaatatctttgtgatgagtgcattcaactcacagagttgaacatttatgttgatagaggagttttaaaacactctttttcaggaatctgaaagtggatatttggagcgctttgaggcctatggtggaaaaggaaacacattcacaaaaaaaactagagcagaagcattctcaggaacttctttgtgatgtgtgcattcaactcacagagttgaacctttttttttgatagagcagttttgaaacactatttttgtacaatctgcggttggatatttggagcgctttgatgcctatggtggaaaacgaaatatccgcacataaaatctagacagcagcattctcagaaacttctttgtgttgtgtgcattcaactcacagagttgaacttttcctttgattgagcagttttgaaaaagtctttttgtagaatccacaagtggatatttggagcagtttgaggcctatggtgtaaaaggaaatatcttcacataaaaactagacagaaagcattctcagaaacttctttgtgttgtgtgcattgaactcacagagttgaacgtttcctatgattgagcagttttgaaacactctttctgaagaatctgcaagtggatatttggagcgctttgaggcctacggtggaaaaggaaacaccttcacaaaaaaactagagcagagcattctcagaaacttctttgtgatgtgtgcattcaactcacagagttgaacctttctttgatagagcagttttgaaacactctttttgtagaatctgcaattggatatttggagctctttgatgcctatggtggaaaaggaaatatccgcacataaaaactagacagcagcattctcagaaacttgtttgtgttgtgtgcattcaactcacagagttgacctttcctttgattgagcagttttgaaaaagtctttttgcagaatctgcaagtggatatttggagcggtttgaggcctatggtgtaaaaggaaatatcttcacataaaaactagacagaagcattctctgaaacttctttgtgatgtgtgaattcaactcacagagttgaacctttcttttgtagagcagttttgaaactctttttgtagaatctgtaagtagatatttggagcgctttgaggcttatggtggaaaaggaaatatcttcacataaaaactagacagaagcattctcagaaacttctttgtgatgagtgcattcaactcacagagttggacctttctgttgatagagcagttttaaaacactctgtttctggaatccgaaagtggatatttggagtgctttgaggcctatgttggaaaaggaaatatcttcacataaaaactagacagaagcattctcagaaatatctttgtgatgagtgcattcaactcacagagttgaacatttatgttgatagaggagttttaaaacactctttttcaggaatttgaaagtggatatttggagcgctttgaggcctatggtgggaaaggaaacaccttcacaaaaaaaactagagcagaagcattctcaggaacttctttgtgatgtgtgcattcaactcacagagttgaaccttttttttttgatagagcagttttgaaacactatttttgtacaatctgcggttggatatttggagcgctttgatgcctatggtggaaaacgaaatatccgcacataaaatctagacagcagcattctcagaaacttgtttgtgttgtgtgcattcaactcacagagttgaacctttcctttgattgagcagttttgaaaaagtctttttgtagaatccacaagtggatatttggagcagtttgaggcctatggtgtaaaaggaaatatcttcacataaaaactagacagaagcattctcagaaacttctttgtgttgtgtgcattcaactcacagagttgaacttttcctatgattgagcagttttgaaacactctttctgaagaatctgcaagtggatatttggagcgctttgaggcctatggtggaaaaggaaacaccttcacaaaaaaactagagcagaagcattctcagaaacgtctttgtgatctgtgaattcaactcacatagttgaacctttctttgatagagcagttttgaaacactctttttgtagaatctgcagttggatgtatggagcgctttgatgcctatggtggaaaaggaagtatccgcacataaaaactagacagcagcattctcagaaacttgtttgtgttgggtgcattcaactcacagagttgagctttcctttgattgagcagttttgaaaaagtctttttgcagaatctgcaagtggatatttggagcggtttgaggcctgtggtgtaaaaggaaatatcttcacataaaaactagacagaagcattctctgaaacttctttgtgatgtgtgaattcaactcacagagttgaacctttcttttgtagagcagttttgaaactctttttgtagaatctgtaagtagatatttggagcgctttgaggcttatgttggaaaaggaaatatcttcacataaaaactagacagaagcattctctgaaacttctttgtgatgtgtgaattcaactcacagagttgaacctttcttttgtagagtagttttgaaactctttttgtagaatgtgtaagtagatatttggagcgctttgaggcttatggtggaaaaggaaatacctacacataaaaactaggcggaagcattctcagaaatatctttgtgatgagtgcattcaactcacagagttgaacatttatgttgatagaggagttttaaaacactctttttcgggaatctgaaagtggatatttggagcgctttgaggcctatggtggaaaaggaaacaccttcacaaaaaaaactagagcagaagcattctcagaaacttcgttgtgatgtgtgcattcaactcacagagttgaacctttttatttgatagagcagttttgaaacactatttttgtacaatctgcggttggatatttggagcgctttgatgcctatggtggaaaacgaaatatccgcacataaaatctagacagcaacattctcagaaacttgtttgtgttgtgtgcattcagctcacagagttgaacctttcctttgattgagcagttttgaaaaagtctttttgtagaatccacaagtggatatttggagcagtttgaggcctatggtgtaaaaggaaatatcttcacataaaaactagacagaagcattctcagaaacttctttgtgttgtgtgcattcaactcacagagttgaacttttcctatgattgagcagttttgaaacactctttctgaagaatctgcaagtggatatttggagcgctttgaggcctatggtggaaaaggaaacaccttcacaaaaaaactagagcagaagcattctcagaaacgtctttgtgatgtgtgcattcaactcacagagttgaaactttctttgatagagcagttttgaaacactctttttgtagaatctgcagttggatatttggagcgctttgatgcctatggtggaaaaggaaatatccgcacataaaaactagacagcagcattctcagaaacttgtttgtgttgtgtgcattcatctaacagagttgaaactttcctttgattgagcagttttgaaaaagtccttttgcagaatctgcaagtggatatttggagcctttgaggcctatggtgtaaaaggaaatatcttcacatagaaactagacagaagcattctccgaaacttctttgtgatgagtgaattcaacgcacagagctgaacctttcttttgatagagcagttttgaaacactctttttgtaggatctgcaagtagatatttggagtgctctgaggcctatggtggaaaaggaaatatcatcatataaaaactagacagaagcattctcagaaacttctttgtgttgtgtgtattcaactcacagagttgaaattttcctttgattgagcagttttgaaacactctttttgtagaatctgcaagtggatatttggagtgctttgaggcctatggtggaaaaggaaacaccttcacataaaaagtagagcagaaacattcttagaaacttctttctgatgtgttcattcatctcacaaagatgaacctttgttttgttagagcagttttgaaacactctttttgtggaatctgcaagtggatattaagagcgctttgaggcctatggtgggaaaggaaatattctcacataaaaactagacagaagcattctcagaaacttgtttgtgttgtgtgcattcagcttacagagttgaacctttcctttgattgagcaattttgaaacagtctttttgtagtatctacaagtgaatacttggagcactttgaggcctatggtggaaaaggaaatatcttcacataaaaactagacagacagcattctcagaaacttgtttgtgttgtgtgcattcaactcacagagttgacctttcctttgattgagcagttttgaaaaagtctttttgcagaatctgcaagttgatatttggagcggtttgaggcctatggtgtaaaaggaaatatcttcacataaaaactagacagagcattctctgaaacttctttgtgatgtgtgaattcaactcacagagttgaacctttcttttgtagagcagttttgaaactctttttgtagaatctgtaagtagatatttggagtgctttgaggcttatggtggaaaaggaaatatcttcacataaaaactagacagaagcattctcagaaacttctttgtgataagtgcactcaactcagagagtcgaacctttctgttgatagagcagttttaaatcactctttttctagaatctgaaagtggatatttggagtgctttggggcctatggtggaaaaggaaatacctacacataaaaactaggcggaagcattctcagaaatatctttgtgatgagtgcattcaactcacagagttgaacatttatgttgatagaggagttctaaaacactctttttcaggaaactgaaagtggatatttggagcgctttgaggcctatggtggaaaaggaaacaccttcacaaaaaaaactagagcagaagcattctcagaaacttctttgtgatgtgtgcattcaactcacagagttgaatcttttttttggatagagcagttttgaaacactatttttgtacaatctgcggttggatatttggagcgctttgatgcctatggtgtaaaatgaaatatccgcacataaaatctagacagcagcattctcagaaacttgtttgtgttgtgtgcattcaactcacagagttgaaccttccctttgattgacaagttttgaaaaagtctttttgtagaatccacaagtggatatttggagcagtttgaggcctatggtgtaaaaggaaatatcttcacataaaaactagacagaagcattctcagaaacttctttgtgttgtgtgcattcaactcacagagttgagcttttcctatgattgagcagttttgaaacactctttctggagaatctgcaagtggatatttggagcgctttgaggcctgtggtggaaaaggaaacaccttcacaaaaaaactagagcagaagcattctcagaaacgtctttgtgatgtgtgcattcaactcacagagttgaacctttctttgatagagcagttttgaaacactctttttgtagaatctgcagttggatatttggagcgctttgatgcctatggtggaaaaggaaatatccgcacataaaaagtagacagcagcattctcagaaacttgtttgtgttgtgtgcattcaactcacagagttgagctttcctttgattgagcagttttgaaaaagtctttttgcagaatctgcaagtggatatttggagcggtttgaggcctatggtgtaaaaggaaatatcttcacataaaaactagacagaagcattctctgaaacttctttgtgatgtgtgaattcaactcacagagttgaacctttcttttgtagagcagttttgaaactctttttgtagaatctgtaagtagatatttggagcgctttgaggcttatggtggaaaaggaaatatcttcacataaaaactagacagaagcattctcagaaacttctttgtgataagtgcattcaactcacagagtcgaacctttctgttgagagagcagttttaaatcactctttttctagaatctgaaagtggatatttggagtgctctgaggcctatggtggaaaaggaaatacctacacataaaaactaggcggaagcattctcagaaatatctttgtgatgagtgcattcaactcacagagttgaacatttatgttgatagaggagttttaaaacactctttttcaggaatctgaaagtggatatttggagcgctttgaggcctatggtggaaaaggaaacacattcacaaaaaaaactagagcagaagcattctcagaaacttcgttgtgatgtgtgcattcaactcacagtgttgaacctttttatttgatagagcagttttgaaacactatttttgtacaatctgcggttggatatttggagcgctttgatgcctatggtggaaaacgaaatatccgcacataaaatctagacagcagcattctcagaaacttgtttgtgttgtgtgcattcaactcacagagttgaacctttcctttgattgagcagttttgaaaaagtctttttgtagaatccacaagtggatatttggagcagtttgaggcctatggtgtaacaggaaatatcttcacataaaaactagacggaagcattctcagaaacttctttgtgttgtgtgcattcaactcacagagttgaacttttcctatgattgagcagttttgaaacactctttctgaagaatctgcaagtggatatttggagcgctttgaagcctatggtggaaaaggaaacaccttcacaaaaaaactagagcagaagcattctcagaaacgtctttgtgatgtgtgcattcaacttacagagttgaacctttctttgatagagcagttttgaaacactctttttgtagaatctgcagttggatatttggagcgctttgatgcctatggtggaaaaggaaatatccgcacataaaaactagacagcagcattctcagaaactttttgtgttgtgtgcattcaactcacagagttgacctttcctttgattgagcagttttgaaaaagtctttttgcagaatctgcaagtggatatttggagcggtttgaggcctatggtgtaaaaggaaatatcttcacataaaaactagacagaagcattctctgaaacttctttgtgatgtgtgaattcaactcacagagtagaacctttcttttgtagagcagttttgaaactctttttgtagaatctgtaagtagatatttggagcgctttgtggcttaatgtggaaaaggaaatatcttcacataaaaactagacagaagcatgctcagaaacttctttgtgataagtgcattcaactcacagagtcgaacctttctggtgatagaccaattttaaaccactctttttctagtatctgaaagtggatatttggagtgctttgtggcctatggtggaaaaggaaatacctacacataaaaactaggccgaagcattctcagaaatatctttgtgatgagtgcattcaactcacagagttgaacatttatgttgatagaggagttttaaaacactctttttcaggaatatgaaactggatatttggagcgctttgaggcctatggtggaaaaggaaacaccttcacaaaaaaaactagagcagaagcattctcagaaacttctttgtgatgtgtgcattcaactcacagagttgaacctttttatttgatagagcagttttgaaacactatttttgtacaatctgtggttggataattggagcgctttgttgcctatggtggaaaacgaaatatccgcacataaaatctagacagcagcattctcagaaacttgtttgtgttgtgtgcattcagctcacagagttgaacctttcctttgattgagcagttttgaaatagtctttttgtagaatccacaagtggagatttggaacagtttgaggcctatggtgtaaaaggaaatatcttcacataaaaactagacagaagcattctcagaaacttctttgtgttgtgtgcattcaactcacagagttgaacttttcctatgattgagcagttttgaaacactctttctgaagaatctgcaagtggatatttggagcgctttgaggcctatggtggaaaaggaaacaccttcacaaaaaaactagagcagaagcattctcagaaacgtctttgtgatgtgtgaattcaactcacagagttgaacctttctttgatagagcagttttgaaacactctttttgtagaatctgcagttggatatttggagcactttgatgcctatggtggaaaaggaaatatccgcacataaaaactagacagcagcattctcagaaacttgtttgtgttgtgtgcattcaactcacagagttgacctttcctttgattgagcagttttgaaaaagtctttttgcagaatctgcaagtggatatttggagcggtttgaggcctatggtgtaaaaggaaatatcttcacataaaaactagacagaagcattctctgaaacttctttgtgatgtgtgaattcaactcacagagttgaacctttcttttgtagagcagttttgaaactctttttgtagaatctgtaagtagatatttggagcgctttgaggcttatggtggaaaaggaaatatcttcacataaaaactagacagaagcattctcagaaacttctttgtgataagtgcattcaactcacacagtcgaacctttctgttgatagagcagttttaaatcactctttttctagaatctgaaagtggatatttggagtgctttgaggcctatggtggaaaaggaaatacctacacataaaaactagtcggaagcattctcagaaatatctttgtgatgagtgcattcacctcacagagttgaacatttatgttgatagaggagttttaaaacacactttttcgggaatatgaaagtggatatttggagcgctttgaggcctatggtggaaaaggaaacaccttcacaaaaaaaactagagcagaagcatcctcaggaacttctttgtgatgtgtgcattcaactcacagagttgaaccttttttttggatagagcagttttgaaacactatttttgtacaatctgcggttggatatttggagcgctttgatgcctatggtggaaaacgaaatatccgcatataaaatctagacagcagcattctcagaaacttgtttgtgttgtgtgcattcagctcacagagttgaacctttcctttgattgagcagttttgaaatagtctttttgtagaatccacaagtggatatttggagcagtttgaggcctatggtgtaaaaggaaatatcttcacataaaaactagacagaagcattctcagaaacttctttgtgttgtgtgcattcaactcacagagttgaacttttcctatgattgagcagttttgaaacactctttctgaagaatctgcaagtggatatttggagcgctttgaggcctatggtggaaaaggaaacaccttcacaaaaaaactagagcagaagcattctcagaaacgtctttgtgatgtgtgcattcaactcacagagttgaacctttctttgatagagcagttttgaaacactctttttgtagaatctgcagttggatatttggagcgctttgatgcatatggtggaaaaggaaatatccgcccataaaaactagacagcagcattctcagaaacttgtttgtgttgtgtgcattcaactcacagagttgacctttcctttgattgagcagttttgaaaaaggctttttgcagaatctgcaagtggatatttggagcggtttgaggcctatggtgtaaaaggaaatatcttcacataaaaactagacagaagcattctctgaaacttctttgtgatgtgtgaattcaactcgcagcgttgaacctttcttttgtagagcagttttgaaactctttttgtagaatctgtaagtagatatttggagcgctttgaggcttatggtggaaaaggaaatatcttcacataaaaactagacagaagcattctcagaaacttctttgtgataagtgcattcaactcacagagtcgaacctttctgttgagagagcagttttaaatcactctttttctagaatctgaaagtggatatttggagtgctctgaggcctatggtggaaaaggaaatacctacacataaaaactaggcggaagcattctcagaaatatctttgtgatgagtgcattcaactcacagagttgaacatttatgttcatagaggagttttaaaacactctttttcaggaatctgaaagtggatatttggagcgctttgaggcctatggtggaaaaggaaacacctacacaaaaaaaactagagcagaagcattctcagaaacgtctttgtgatgtgtgcattcaactcacagagttgaacctttttttttgatagagcagttttgaaacactatttttgtacaatctgcggttggatatttggagcgctttgatgcctatggtggaaaacgaaatatccgcacataaaatctagacagcagcattctcagaaacttgtttgtgttgtgtgcattcaactcacagagttgaacctttcctttgattgagcagttttgaaaaagtctttttgtagaatctacaagtggatatttgaagcacattgaagcctatgatggaaaaggaaatatcttcacatacaaactagacagaagcattctcagaaacttctttgtgttgtgtgcattcaactcacagagttgaacttttcctatgattgggcagttttgaaacactctttctgaagaatctgcaagtggatatttggagcgctttgaggcctatggtggaaaaggaaacaccttcacaaaaaaaccagagcagaagcattctcagaaacgtctttatgatgtgtgcattcaactcacagagttgaaactttctttgatagagcagttttgaaacactcttattgtagaatctgcagttggatattttgagcgctttgatgcctatggtagaaaaggaaatatccgcacataaaatctagacagcagcattctcagaaacttgtttgtgttgtgtgcattcaactcacagagttgacctttcctttgattgagcagttttgaaaaagtctttttgcagaatctgcaagttgatatttggagcggtttgaggcctatggtgtaaaaggaaatatcttcacataaaaactagacagaagcattctctgaaacttctttgtgatgtgtgaattcaactcacagagttgaacctttcttttgtagagcagttttgaaactctttttgtagaatctgtaagtagatatttggagcgctttgaggcttatggtggaaaaggaaatatcttcacataaaaactagacagaagcattctcagaaacttctttgtgataagtgcattcaactcacagaatcgaacctttctgttgatagagcagttttaaatccctctttttcaagaatctgaaagtggatatttggagtgctttgaggcctatggaggaaaaggaaatacctacacataaaaactaggcggaagcattctcagaaatatctttgtgatgagtgcattcaactcacagagttgaacatttatgttgatagaggagttttaaaacactctttttcaggaatctgcaagtggatatttggagcggtttgaggcctatggtgtaaaaggaaatatcttcacgtaaaaactagacagaagcattctctgaaacttctttgtgatgtgtgcgttcaactcacagagttgcacctttttttttgatagagcagttttgaaacactatttttgtacaatctgcggttggatatttggagcgctttgatgcctatggtggaaaatgaaatatccgcacataaaatctagacagcagcattctcagaaacttgtttgtgttgtgtgcattcagctcacagagttgaacctttcctttgattgagcagttttgaaatagtctttttgtaggatccacaagtggatatttggagcagtttgaggcctatggtgtaaaaggaaatatcttcacataaaaactagacagaagcattctcagaaacttctttgtgttgtgtgcattcaactcacaaagttgaacttttcctatgattgagcagttttgaaacactctttctgaagaatctgcaagtggatatttggagtgctttgaggtctatggtggaaaagcaaacaccttcacaaaaaaaactagagcagaagaattctcagaaacgtctttgtgatgtgtgcattcaactcacagagttgaacctttctttgatagagcagttttgaaacactctttttctagaatctgcagttggatatttggagcgctttgatgcctatggtggaaaaggaaatatccgcacataaaaactagacagcagcattctcagaaacttgtttgtgttgtgtgcattcaactcacagagttgacctttcctttgattgagcagttttgaaaaagtctttttgcagaatctgcaagtggatatttggagcggtttgaggcctatggtgtaaaaggaaatatcttcacataaaaactagacagaagcattctctgaaacttctttgtgatgtgtgaattcaacctcacagagttgaacctttcttttgtagagcagttttgaaactctttttgtagaatgtgtaagtagatatttggagcgctttgaggcttatggtggaaaaggaaatatcttcacataaaaactagacagaagcattctcagaaacttccttgtgataagtgcattcaactcacagagtggaacctttctgttgatagagcagttttaaatcactctttttctagaatctgaaagtggatatttggagtgctttgaggcctatggtggaaaaggaaatacctacacataaaaactaagcggaagcattctcagaaatatctttgtgatgagtgcattcaactcacagagttgaacacttatgttgatagaggagttttaaaacactctttttcaggaatctgaaagtggatatttggagcgctttgaggcctatggtggaaaaggaaacaccttcacaaaaaaaactagagcagaagcattctcagaaacttctttgtgatgtgtgcattcaactcacagagttgaacctttttttttcatagagcagttttgaaacactatttttgtacaatctgcggttggatatttgtagcgctttgatgcctatggtggaaaacgaaatatccgcacataaaatctagacagcagcattctcagaaacttgtttgtgttgtgtgcattcaactcacagagttgaacctttcctttgattgagcagttttgaaaaagtctttttgtagaatccacaagtggatatttggagcagtttgaggcctatggtgtaacaggaaatatcttcacataaaaactagacggaagcattctcagaaacttctttgtgttgtgtgcattgaactcacagagttgaacgtttcctatgattgagcagttttgaaacactctttctgaagaatctgcaagtggatatttggagcgctttgaggcctacggtggaaaaggaaacaccttcacaaaaaaactagagcagaagcattctcagaaacgtctttgtgatgtgtgcattcaactcacagagttgaacctttctttgatagagcagttttgaaacactctttttgtagaatctgcagttggatatttggagcgctttgatgcctatggtggaaaaggaaatatccgcacataaaaagtagacagcagcattctcagaaacttgtttgtgttgtgtgcattcaactcacagagttgacctttcctttgattgagcagttttgaaaaagtctttttgcagaatctgcaagtggatatttggagcggtttgaggcctatggtgtaaaaggaaatatcttcacataaaaactagacagaagcattctctgaaacttctttgtgatgtgtgaattcaactcgcagagttgaacctttcttttgtagagcagttttgaaactctttttgtagaatctgtaagtagatatttggagcgctttgaggcttatggtggaaaaggaaatatcttcacataaaaactagacagaagcattctcagaaacttctttgtgataagtgcattcaactcacagagtcgaacctttctgttgatagagcagtttaaaatcactctttttctaacatctgaaagtggatatttggagtgctttgtggcctatggtggaaaaggaaatacctacacataaaaactaggccgaagcattctcagaaatatctttgtgatgagtgcattcaactcacagagttgaacatttatgttgatagaggagttttaaaacactctttttcaggaatctgaaagtggatatttggagcgctttgaggcctatggtggaaaaggaaacaccttcacaaaaaaaactagagcagaagcattctcagaaacttctttgtaatgtgtgcattcaactcacagagttgaacctttttttttgatagagcagttttgaaacactatttttgtacaatctgcagttggatatttggagcgctttcatgcctatggtggaaaacgaaatatccgcacataaaatctagacagcagcattctcagtaaacttgtttgtgttgtgtgcattcaactcacagagttgaacctttcctttgattgagcagttttgaaaaagtctttttgtagaatccacaagtggatatttggagcagtttgaggcctatggtgtaacaggaaatatcttcacataaaaactagacggaagcattctcagaaacttctttgtattgtgtgcattcaactcacaaagttgaacttttcctatggttgagcagttttgaaacactctttctgaagaatctgcaagtggatatttggagtgctttgaggtctatggtggaaaagaaaacaccttcacaaaaaaattagagcagaagcattctcagaaacttctttgtgatgtgtgcattcaactcacagagttgaacctttctttgatagagcagttttgaaacactctttttgtttctgcaattggatatttggagctctttgatgcctatggtggaaaaggaaatatccacacataaaaactagacagcagcattctcagaaacttgtttgtgttgtgtgcattcaactcacagagttgacctttcctttgattgagcagttttgaaaaagtctttttgcagaatctgcaagttgatatttggagcggtttgatgcctattgtgtaaaaggaaatatcttcacataaaaactagacagaagcattctctgaaacttctttgtgatgtgtgaattcaactcacggagttgaacctttcttttgtagagcagttttgaaactctttttgtagaatctgtaaatagatatttggagcgctttgaggcttatggtggaaaaggaaatatcttcacataaaaactagacagaagcattctcagaaacttctttgtgataagtgcattcaactcacagagtcgaacctttctgttgatagagcagttttaaatcacactttttctagaatctgaaagtggatatttggagtgctctgaggcctatggtggaaaaggaaatacctacacataaaaactaggcggaagcattctcagaaatatctttgtgatgagtgcattcaactcacagagttgaacatttatgttgatagaggagttttaaaacactctttttcgggaatctgaaagtggatatttggagcgctttgaggcctatggtggaaaaggaaacaccttcacaaaaaaaactagagcagaagcattctcaggaacttctttgtgatgtgtgcattcaactcacagagttgaacctttttttttgatagagcagttttgaaacactatttttgtacaatctgcggttggatattaggggcgctttgatgcctatggtggaaaacgaaatatccgcacataaaatctagacagcagcattctcagaaacttgtttgtgttgtgtgcattcaactcacagagttgaacctttcctttgattgagcagttttgaaaaagtctttttgtagaatccacaagtggatatttggagcagtttgaggcctatggtgtaaaaggaaatatcttcacataaaaactagacagaagcattctcagaaacttctttgtgttgtgtgcattcaactcacagagttgaacttttcctatgatttagcagttttgaaacactctttctgaagaatctgcaagtggatatttggagcgctttgaggcctatggtggaaaaggaaacaccttcacaaaaaaacaagagcagaagcattctcagaaaagtctttgtgatgtgtgcattcaactcacagagttgaacctttctttgatagagcagttttgaaacactctttttgtagaatctgcagttggatatttggagcgctttgatgcctatggtggaaaaggaaatatccgcacataaaaacaagacagccagcattctcagaaacttgtttgtgttgtgtgcattcaactcacagagttgacctttcctttgattgagcagttttgaaaaagtctttttgcagaatctgcaagttgatatttggagcggtttgaggcctatggtgtaaaaggaaatatcttcacataaaaactagacagagaattctcagaaacttctttgtgatgtgtgcattcaactcacagatttgatcctttcttttgatagagcagttttgaaacactctttttgtagaatctgaaagtggatatttggagagctttgaggcctagggtggaaaaggaaatatctacacataaaaactagacagacagaagcattctctgaaacttctttgtgataagtgcattcaacccacagagtagaacctttctgttgatagaacagttttaaatcactctttttctagaatctgaaagtggatatttggagtgctttgaggcctatggtggaaaaggaaatacctacacataaaaactaggcggaagcattctcagaaatatctttgtgatgagtgcattcaactcacagagttgaacatttatgttgatagaggagttttaaaacactctttttcaggaatctgaaagtggatatttggagcgctttgaggcctatggtggaaaaggaaacaccatcacaaaaaaaaactagagcagaagcattctcagaaacttctttgtgatgtgtgcattcaactcacagagttgaacctttttttttcatagagcagttttgaaacactatttttgtacaatctgcggttggatatttggagcgctttgatgcctatggtggaaaacgaaatatccgcacataaaatctagacagcagcattctcagaaacttgtttgtgttgtgtgcattcaactcacagagttgaacctttcctttgattgagcagttttgaaaaagtctttttgtagaatccacaagtggatatttggagcagtttgaggcctatggtgtaaaaggaaatatcttcacataaaaactagacagaaacattctcagaaacttctttgtgttgtgtgcattcaactcacagagttgaacttttcctatgattgagcagttttgaaacactctttctgaagaatctgcaagtggataattggagcgctttgaggcatatggtggaaaaggaaacaccttcacaaaaaaactagagaagaagcattctcagaaacgtctttgtgatgtgtgcattcaactcacagagttgaacctttctttgatagagcagttttgaaacactctttttgtagaatctgcagttggatatttggagcgctttgatgcctatggtggtaaaggaaatgtccgcccataaaaactagacagcagcatgctcagaaacttgtttgtgttgtgtgcattcaactcacagagttgacctttcctttgattgagcagttttgaaaaagtctttttgtagaatctgcaagtggacatttggagcggtttaaggcctatggtgtaaaaggaaatatcttcacataaagactagacagaagcattctctgaaacttctttgtgatgtgtgaattcaactcgcagagttgaacctttcttttgtagagcagttttgaaactctttttgtagaatctgtaagtagatatttggagcgctttgagtcttatggtggaaaaggaaatatcttcacataaaatgctagacagaagcattctcagaaagttctttgtgataagtgcattcaactcacagagtcgaacctttctgttgatagagcagttttaaatcactctttttctagaatctgaaagtggatatttggagtgctttgaggtctatggtggaaaaggaaatacctacacataaaaactaggcggaagcattctcagaaatatctttgtgatgagtgcattcaacacaaagagttgaacatttatgttgatagaggagttttaaaacactctttttctggaatctgaaagtggatatttgtagcgctttgaggcctatggtggaaaaggaaacaccttcacaaaaaaaactagagcagaagcattctcagaaagttctttgtgatgtgtgcattcaactcacagagttgaatctttttttttgatagagcagttttgaaacactatttttgtacaatctgcagttggatatttggagcgctttgatgcctatggtggaaaacgaaatatccgcacataaaatctagacagcagcattctcagaaacttgtttgtgttgtgtgcattcaactcacagagttgaacctttcctttgattgagcagttttgaaaaagtctttttgtagaatccacaagtggatatttggagcagtttgaggcctatggtgtaaaaggaaatatcttcacataaaaactagacagaagcattctcagaaacttctttgtgttgtgtgcattcaactcacagagttgaacttttcctatgattgagcagttttgaaacactctttctgaagtatctgcaggtggatatttggagcgctttgaggcctatggtggaaaaggaaacaccttcacaaaaaaactagagcagaagcattctcagaaacgtctttgtgatgtgtgcattcaactcacagagttgaacctttctttgatagagcagttttgaaacactctttttgtagaatctgcagttggatatttggagcgctttgatgcatatggtggaaaaggaaatatccgcccataaaaactagacagcagcattctcagaaacttgtttgtgttgtgtgcattcaactcacagagttgagctttcctttgattgagcagttttgaaaatgtctttttgcagaatctgcaagtggatatttggagcggtttgaggcctatggtgtaaaaggaaataccttcacataaaaactagacagaagcattctctgaaacttctttgtgatgtgtgaattcaactcacagagttgaacctttcttttgtagagcagttttgaaactctttttgtagaatctgtaagtagatatttggagcgctttgaggcttatggtggaaaaggaaatatcttcacataaaaactagacagaagcattctcagaaatttctttgtgataagtgcattcaacccacagagtagaacctttctgttgatagagcagttttaaatcactctttttctagaatctgaaagtggatatttggagtgctttgaggcctatggtggaaaaggaaatacctacacataaaaactaggcggaagcattctcagaagtatctttgtgatgagtgcattcaactcacagagttgaacacttatgttgatagaggagttttaaaacactctttttcaggaatctgaaagtggatatttggagcactttgaggcctatggtggaaaaggaaacaccatcacaaaaaaaactagagcagaagcattctcagaaacttctttgtgatgtgtgcattcaactcacagagttgaacctttttttttgaaagagcagttttgaaacactatttttgtacaatctgcggttggatatttggagcgctttgatgcctatggtggaaaacgaaatatccgcacataaaatctagacagcagcattctcagaaacttgtttgtgttgtgtgcattgaactcacagagttgaacctttcctttgattgagcagttttgaaaaagtctttttgtagaatccacaagtggatatttggagcagtttgaggcctatggtgtaaaaggaaatatcttcacataaaaactagacagaagcattctcagaaacttgtttgtgttgtgtgcattcaactcacagagttgaacttttcctatgattgagcagttttgaaacactctttctgaagaatctgcaagtggatatttggagcgctttgaggcctatggtggaaaaggaaacaccttcacaaaaaaactagagcagaagcattctcagaaacgtctttgtgatgtgtgcattcaactcacagagttgaacctttctttgatagagcagttttgaaacactctttttgtagaatctgcagttggatatttggagcgctttgatgcctatggtggaaaaggaaatatccgcacataaaaactagacagcagcattctcagaaacttgtttgtgttgtgtgcattcaactcacagagttgagctttcctttgattgagcagttttgaaaaagtctttttgcaaaatctgcaagtggatatttggggcggtttgaggcctatggtgtaaaaggaaatatcttcacataaaaactagacagaagcattctctgaaacttctttgtgatgtgtgaattcaactcacagagttgaacctttcttttgtagagcagttttgaaactctttttgtagaatctgtaagtagatatttggagcgctttgaggcttatggtggaaaacgaaatatcttcacataaaaactagacagaagcattctcagaaacttctttgtgataagtgcattcaactcacagagtcgaacctttctgttgatagagcagttttaaatcactctttttctagaatctgaaagtggatatttggagtgctctgaggcctatggtggaaaaggaaatacctacacataaaaactaggcggaagcattctcagaaatatctttgtgatgagtgcattcaactcacagagttgaacatttatgctgatagaggagttttaaaacactctttttcaggaatctgaaactggatatttggagcgctttgaggcctgtggtgaaaaaggaaacaccttcacaaaaaaaactagagcagaagcattctcagaaacttctttgtgatgtgtgcattcaactcacagagttgaacctttttttttgatagagcagttttcaaacactatttttgtacaatctgcggttggatatttggagcgctttgatgcctatggtggaaaacgaaatgtccggacataaaatctagacagcagcattctcagaaacttgtttgtgttgtgtgcattcagctcacagagttgaacctttcctttgattgagcagttttgaagaagactttttgtagaatccacaagtggatatttggagctgtttgaggcctatggtgtaaaaggaaatatcttcacataaaaactagacagaagcattctcagaaacttctttgtgttgtgtgcattcaactcacagagttgaacttttcctatgattgagcagttttgaaacactctttctgaagaatctgcaagtggatatttggagcgctttgaggcctatggtggaaaaggaaacaccttcacaaaaaaactagagcagaagcattctcagaaacgtctttgtgatgtgtgcattcaactcacagagttgaacctttctttgatagagcagttttgaaacactctttttgtagaatctgcagttggatatttggagcgctttgatgcctgtggtggaaaaggaaatatccgcccataaaaactagacagcagcattctcagaaacttgtttgtgttgtgtgcattcaactcacagagttgagctttcctttgattgagcagttttgaaaaagtctttttgcagaatctgcaagtggatatttggagcggtttgaggcctatggtgtaaaaggaaatatcttcacataaaaactagacagaagcattctctgaaacttctttgtgatgtgtgaattcaactcacagagttgaacctttcttttgtagagcagttttgaaactctttgtgcagaatctgtaagtagatatttggagcgctttgaggcttctggtggaaaaggaaatatcttcacataaaaactagacagaagcattctcagaaacttctttgtgataagtgcattcaacccacagagttgagcctttcttttgatagagcagttttaaaacactctttttctagaatctgaaagtggatatttggagcgctttgaggcctatggaggaaaaggaaatatcttcacataaaaactagatggaagcattctcagaaatatctttgtgatgagtgcattcacctcacagagttgaacatttatgttgatagaggagttttaaaacacactttttcgggaatatgaaagtggatatttggagcgctttgaggcctatggtggaaaaggaaacaccttcacaaaaaaaactagagcagaagcattctcagaaacttctttgtgatgtgtgcattcaactcacagagttgaaactttttttttgatagagcagtcttgaaacactatttttgtacaatctgcggttggataattggagcgctttgttgccgatggtggaaaacgaaatatccgcacataaaatctagacagcagcattctcagaaacttgtttgtgttgtgtgcattcaactcacagagttgaacctttcctttgattgagcagttttgaaaaagtctttttgaagaatccacaagtggatatttggagcagtttgaggcctatggtgtaaaaggaaatatcttcacataaaaactagacagaagcattctcagaaacttctttgtgttgtgtgcattcaactcacaaagttgaacttttcctatgattgagcagttttgaaacactctttctgaagaatctgcaagtggatatttggagtgctttgaggtctatggtggaaaagcaaacaccttcacaaaaaaaactagagcagaagcaatctcagaaacgtctttgtgatgtgtgcattcaactcacagagttgaacctttctttgatagagcagttttgaaacactctttttgtggaatctgcagttggataattggagcgctttgatgcctatggtggaaaaggaaatatccgcccataaaaactagacagcagcattctcagaaacttgtttgtgttgtgtgcattcaactcacagagttcacctttcctttgattgagcagttttgaaaaagtctttttgcagaatctgcaagtggatatttggagcggtttgaggcctatggtgtaaaaggaaatatcttcacgtaaaaactagacagaagcattctctgaaacttctttgtgatgtgtgaattcaactcgcagagttgaacctttcttttgtagagcagttttgaaactctttttgtagaatctgtaagtagatatttggagcgctttgaggcttatggtggaaaagggaatatcttcacataaatactagacagaagcattctcaggaacttctttgtgataagtgcattcaactcacagagtcgaacctttctgttgatagagcagttttaaatcactctttttctagaatctgaaagtggatatttggagtgctttgaggcctatggtggaaaaggaaatacctacacataaaaactaggcggaagcattctcagaaatatctttgtgatgagtgcattcaactcacagagttgaacatttatgttgatagaggagttttaaaacactctttttcaggaatctgcaagtggatatttggagcggtttgaggcctatggtgtaaaaggaaatatcttcacgtaaaaactagacagaagcattctcagaaacttcgttgtgatgtgtgcattcaactcacagagttgaacctttttatttgatagagaagttttgaaacactatttttgtacaatctggggttggatatttggagcgctttgatgcctatggtggaaaacgaaatatccgcacatgaaatctagacagcagcattctcagaaacttgtttgtgttgtgtgcattcagctcacagagttgaacctttcctttgattgagcagttttgaaatagtctttttgtaggatccacaagtggatatttggagcagtttgaggcctatggtgtaaaaggaaatatcttcacataaaaactagacagaaacattctcagaaacttgtttgtgttgtgtgcattcaactcacagagttgaacttttcctatgattgagcagttttgaaacactctttctgaagaatctgcaagtggatatttggagcgctttgaggcctatggtggaaaaggaaacaccttcacaaaaaaactagagcagaagcattctcagaaacgtctttgtgatgtgtgcattcaactcacagagttgaacctttctttgatagagcagttttgaaacactctttttgtagaatctgcagttggatatttggagcgctttgatgcctatggtggaaaaggaaatatccggccataaaaactagacagcagcattctcacaaacttgtttgtgttctgtgcattcaactcacagagttgagctttcctttgattgagcagttttgaaaaagtctttttgcagaatctgcaagtggatatttggagcggtttgaggcctatggtgtaaaaggaaatatcttcacataaaaactagacagaagcattctctgaaacttctttgtgatgtgtgaatccaactcacggagttgaacctttcttttgtagagcagttttgaaactctttttgtagaatctgtaagtagatatttggagcgctttgaggcttatggtggaaaaggaaatatcttcacataaaaactagacagaagaattctcagaaacatctttgtgataagtgcattcaactcacagagtcgaacctttctgttgatagagcagttttaaatcactctttttctagaatctgaaagtggatatttggagtgctttgaggcctatggtggaaaaggaaatacctacacataaaaactaggtggaagcattctcagaagtacctttgtgatgagtgcattcaactcacagagttgaaaacttatgttgatagaggagttttaaaacattctttttcaggaatctgaaagtggatatttggagcgctttgaggcctatggtggaaaaggaaacaccttcacaaaaaaaactagagcagaagcattctcagaaacttcgttgtgatgtgtgcattcaactcacagagttgaacctttttatttgatagagctgttttgaaacactatttttgtacaatctgcggttggatatttggagcgctttgatgcctatggtggaaaacgaaatatccgcacatgaaatctagacagcagcattctcagaaacttgtttgtgttgtgtgcattcaactcacagagttgaacctttcctttgattgagcacttttgaaaaagtctttttgtagaatccacaagtggatatttggagcagtttgaggcctatggtgtaaaaggaaatatcttcacataaaaactagacagaagcattctcagaaacttctttgtgttgtgtgcattcaactcacagagttgaacttttcctatgattgagcagttttgaaacactctttctgaagaatctgcaagtggatatttggagcgctttgaggcctatggtggaaaaggaaacaccttcacaaaaaaactagagcagaagaattctcagaaacgtctttgtgatgtgtgcattcaactcacagagttgaacctctctttgatagagcagttttgaaacactctttttgtagaatctgcagttggatatttggagcgctttgatgcctatggtggaaaaggaaatatccgcacataaaaactagacagcagcattctcagaaacttgtttgtgttctgtgcattcaactcacagagttgagctttcctttgattgagcagttttgaaaaagtctttttgcagaatctgcaagtggatatttggagcggtttgaggcctgtggtgtaaaaggaaatatcttcacataaaaactagacagaagcattctctgaaacttctttgtgatgtgtgaattcaactcacagagttgaacctttcttttgtagagcagttttgaaactctttttgtagaatctgtaagtagatatttggagcgctttgaggcttatggtggaaaaggaaatatcttcacataaaaactagacagaagcattctcagaaacttctttgtgatcagtgcattcaactcacagagtcgaacctttctgttgatggagcagttttaaatcactctttttctagaatctgaaggtggatatttggagtgctctgaggcctatggtggaaaaggaaatacctacacataaaaactaggcggaagcattctcagaaatatctttgtgatgagtgcattcaactcacagagttgaacacttatgttgatagaggagttttaaaacactctttttcaggaatctgaaagtggatatttggagcgctttgaggcctgtggtggaaaaggaaacaccttcacaaaaaaaactagagcagaagcattctcagaaacttctttgtgatgtgtgcattcaactcacagagttgaacctttttttttgatagagcagttttgaaacactatttttgtacaatctgcggttggatatttggagcgctttgatgcctatggtggaaaacgaaatatccgcacataaaatctagacgagcagcattctcagaaacttgtttgtgttgtgtgcattcaactcacagagttgaacctttcctttgattgagcagttttgaaaaagtctttttgtagaatccacaagtggatatttggagcagtttgaggcctatggtgtaaaaggaaatatcttcacataaaaactagacagaagcattctcagaaacttctttgtgttgtgtgcattcaactcacagagttgaacttttcctatgattgagcagttttgaaacactctttctgaagtatctgcaagtggatatttggagcgctttgaggcctatggtggaaaaggaaacaccttcacaaaaaaactagagcagaagcattctcagaaacgtctttgtgatgtgtgcattcaactcacagggttgaacctttctttgatagagcagttttgaaaccctctttttgtagaatctgcagttggatatttggagcgctttgatgcctatggtggaaaaggaaatatccgcacataaaaactagacagcagcattctcagaaacttgtttgtgttgtgtgcattcaactcacagagttgaacctttcctttgattgagcagttttgaaaaagtctttttgcagaatctgcaagtggatatttggagcggtttgaggcctatggtgtaaaaggaaatatcttcacataaaatctagacggaagcattctctgaaacttctttgtgatgtgtgaattcaactcacagagttgaacctttcttttgtagagcagttttgaaactctttatgtagaatctgtaagtagatatttggagcgctttgaggcttatggtggaaaaggaaatatcttcacataaaaactagacagaagcattctcagaaaattctttgtgataagtgcattcaactcacagagtcgatcctttctgttgatagagcagttttaaatcactctttttctagaatctgaaagtggatatttggagtgctttgaggcctatggtggaaaaggaaatacctacacataaaaactaggcggaagcattctcagaaatatctttgtgatgagttcattcaactcacagagttgaacacttatgttgatagaggagttctaaaacactctttttcaggaatctgaaagaggatatttggagcgctttgaggcctgtggtggaaaaggaaacaccttcacaagaaaaactagagcagatgcattctcagaaagttctttgtgatgtgtgcattcaactcacagagttgaaactttttttttgatagagcagttttgaaacactatttttgtacaatctgcggttggatatttggagcgctttgatgcctatgttggaaaacgaaatatccgcacataaaatctagacagcagcattctcagaaacttgtttgtgttgtgtgcattcagctcacagagttgaacctttcctttgattgagcagttttgaaaaagtctttttgtagaatccacaagtggatatttggagcagtttgaggcctatggtgtaaaaggaaatatcttcacataaaaactagacagaagcattctcagaaacttctttgtgttgtgtgcattcaactcacagagttgaacttttcctatgattgagcagttttgaaacactctttctgaagaatctgcaagtggatatttggagcgctttgaggcctatggtggaaaaggaaacaccttcacaaaaaaactagagcagaagcattctcagaaacgtctttgtgatgtgtgcattcaacccacagagttgaacctttctttgatagagcagttttgaaacactctttttgtagaatctgcagttggatatttggagcgctttgatgcctatggtggaaaaggaaatatccgcacataaaaagtagacagcagcattctcagaaacttgtttgtgttgtgtgcattcaactcacagagttgacctttcctttgattgagcagttttgaaaaagtctttttgcagaatctgcaagtggatatttggagcggtttgaggcctatggtgtaaaaggaaatatcttcacataaaaactagacagaaggattctctgaaacttctttgtgatgtgtgaattgaactcgcagagttgaacctttcttttgtagagcagttttgaaactctttttgtagaatctgtaactagatatttggagcgctttgaggcttatggtggaaaaggaaatatcttcacataataactagacagaagcattctcagaaacttcttcgtgataagtgcattcaactcagagagttgaacctttctgttgatagagcagttttaaatcactctttttctagaatctgaaagtggatatttggagtgctttgaggcctatggtggaaaaggagatacctacacataaaaactaggcggaagcattctcagaaatatctttgtgatgagtgcattcaactcacagagttgaacatttatgttgatagaggagttttaaaacactctttttcaggaatctgaaagtggatatttggagcgctttgaggcctatggtggaaaaggaaacaccttcacaaaaaaaactagagcagaagcattctcagaaacttctttgtgatgtgtgcattcaactcacagagttgaatctttttttttgatagagcggttttgaaacactatttttgtacaatctgcggtaggatatttggagcgctttgatgcctatggtggaaaatgaaatatccacacataaaatctagacagcaacattctcagaaacttgtttgtgttgtgtgcattcaactcacagagttgaacctttcctttgattgagcagttttgaaaaagtctttttgtagaatccacaagtggatatttggagcagtttgaggcctatggtgtaaaaggaaatatcttcacataaaaactagacagaagcattctcagaaacttctttgtgttgtgtgcattcaactcacagagttgaacctttcctatgattgagcagttttgaaacactctttctgaagaatctgcaagtggatatttggagcgctttgaggcctatggtggaaaagcaaacaccttcacaaaaaaactagagcagaagcattctcagaaacgtctttgtgatgtgtgcattcaactcacagagttgaacctttctttgatagagcagttttgaaacactctttttgtagaatctgcagttggatatttggagcgctttgatgcctatggtggaaaaggaaatatccgcacataaaaactagacagcagcattctcagaatcttgtttgtgttgtgtgcattcaactcacagagttgccctttcctttgattgagcagttttgaaaaagtctttttgcagaatctgcaagtggatatttggagcggtttgaggcctatggtgtaaaaggaaatatcttcacataaaaactagacagaagcattctctgaaacttctttgtgatgtgtgaattcaactcgcagagttgaacctttcttttgtagagcagttttgaaactctttttgtagaatctgtaagtagatatttggagcgctttgaggcttatggtggaaaaggaaatatcttcacataaaaactagacagaagcattctcagaaacttctttgtgataagtgcattctactcacagagtcgaacctttctgttgatagagcagttttaaatcactctttttctagaatctgaaagtggatatttggagtgctttgaggcctatggtggaaaaggaaatacctacacataaaaactaggcggaagcattctcagaaatatctttgtgatgagtgcattcaactcacagagttgaacatttatgttgatagaggagttttaaaacactctttttcaggaatctgaaagtggatatttggagcgctttgaggcctatggtggaaaaggaaacaccttcacaaaaaaaaactagagcagaagcattctcagaaacttctttgtgatgtgtgcattcaactcacagagttgaacctttttttttgatagagcagttttgaaacactatttttgtacaatctgcggttggatatttggagcgctttgatgcctatggtggaaaaggaaatatccgcacataaaatctagacagcagcattctcagaaacatgtttgtgttgtgtgcattcagctcacagggttgaacctttcctttgattgagcagttttgaaaaagtctttttgtagaatctgcaagtggatatttggagcagtttgaggcctatggtgtaaaaagaaatatcttcacataaaaactagacagaagcattttcagaaacttctttgtgttgtgtgcattcaactcacagagttgaacttttcctatgattgagcagttttgaaacactctttctgaagaatctgcaagtggatatttgtagcgctttgaggcctgtggtggaaaaagaaacaccttcacaaaaaaactagagcagaagcattctcagaaacgtatttgtgatgtgtgcattcaactcacagagttgaacctttctttgatagagcagttttgaaacactctttttgtagaatctgcagttggatatttggagcgctttgatgcctatggtggaaaaggaaatatccgcccataaaaactagacagcagcattctcagaaacttgtttgtgttgtgtgcattcaactcacagagttgacctttcctttgattgagcagttttgaaaaagtctttttgcagaatctgcaagtggatatttggagcggtttgaggcctatggtgtaaaaggaaatatcttcacataaaaactagacagaagcattctctgaaacttctttgtgatgtgtgaattcaactcacagagttgaacctttcttttgtagagcagttttgaaactctttttgtagaatctgtaagtagatatttggagcgctttgaggcttatggtggaaaaggaaatatcttcacataaaaactagacagaagcattctcagaaacttctttgtgataagtgcattcaactcacagagtcgaacctttctgttgatagggcagttttaaatcactctttttctagaatctgaaagtggatatttggagtgctctgtggcctatggtggaaaaggaaatacctacacataaaaactaggcggaagcattctcagaaatattttgtgatgagtgcattcaactcacagagttgaacacttatgttgatagaggagttttaaaacactctttttcagaaatctgaaagtggatatttggagcgctttgaggcctatggtggaaaaggaaacaccttcacaaaaaaaactagagcagaagcattctcagaaacttcgttgtgatgtgtgcattcaactcacagagttgaacctttttatttgatagagcagttttgaaacactatttttgtacaatctgcggttggatatttggagcgctttgatgcctatggtggaaaacgaaatatccgcacataaaatctagacagcagcattctcagaaacttgtttgtgttgtgtgcattcagctcacagagttgaacctttcctttgattgagcagttttgaaatagtctttttgtagaatccacaagtggatatttggagcagtttgaggcctatggtgtaaaaggaaatatcttcacataaaaactagacagaagcattctcagaaacttctttttgttgtgtgcattcaactcacagagttgaacttttcctatgattgagcagttttgaaacactctttctgaagaatctgcaagtggatatttggagcgctttgaggcctgtggtggaaaaagaaacaccttcacaaaaaaactagagcagaagcaatctcagaaacgtctttgtgatgtgtgcattcaactcacagagttgaacctttctttgatagagcagttttgaaacactctttttgtagaatctgcagttggatatttggagcgctttgatgcctatggtggaaaaggaaatatccgcacataaaaactagacagcagcattctcaggaacttgtttgtgttgtgtgcattcaactcacagagttgacctttcctttgattgagcagttttgaaaaagtctttttgcagaatctgcaagtggatatttggagcggtttgaggcctatggtgtaaaaggaaatatcttcacataaaaactagacagacaagcattctctgaaacttctttgtgatgtgtgaattcaactcacagagttgaacctttcttttgtagagcagttttgaaactctttttgtagaatgtgtaagtagatatttggagcgctttgaggcttatggtggaaaaggaaatatcttcacataaaaactagacagaagcattctcagaaacttctttgtgataagtgcattcaactcacagagtcgaacctttctgttgatagagcagttttaaatcactctttttctagaatctgaaagtggatatttggagtgctctgaggcctatggtggaaaaggaaatacctacacataaaaactaggcggaagcattctcagaaatatctttgtgatgagtgcattcacctcacagagttgaacatttatgttgatagaggagttttaaaacacactttttcgggaatatgaaagtggatatttggagcactttgaggcctatggtggaaaaggaaacaccttcacaaaaaaaactagagcagaagcattctcaggaacttctttgtgatgtgtgcattcaactcacagagttgaacctttttttctgatagagcagttttgaaacactatttttgtacaatctgcggttggatatttggagcgctttgatgcctatggtggaaaacgaaatatccgcacataaaatctagacagcagcattctcagaaacatgtttgtgttgtgtgcattcaactcacagagttgaacctttcctttgattgagcagttttgaaaaagtctttttgtagaatccacaagtggatatttggagcagtttgaggcctgtggtataaaaggaaatatcttcacatgaaaactagacagaagcattctcagaaacttctttgtgttgtgtgcattcaactcacagagttgaacttttcctatgattgagcagttttgaaacactctttctgaagaatctgcaagtggatatttggagcactttgaggcctatggtggaaaaggaaacaccttcacaaaaaaactagagcagaagcattctcagaaacgtctttgtgatgtgtgcattcaactcacagagttgaacctttgtttgatagagcagttttgaaacactctttttgtagaatctgcagttggatatttggagcgctttgatgcctatggtggaaaaggaaatatccgcacataaaaactagacagcagcattctcagaaacttgtttgtgttgtgtgcattcaactcacagagttggcctttcctttgattgagcagttttgaaaatgtctttttgcagaatctgcaagtggatatttggagcggtttgaggcctatggtgtaaaaggaaatatcttcacataaaaactagacagaagcattctctgaaacttctttgtgatgtgtgaattcaactcacagagttgaacctttcttttgtagagcagttttgaaactctttttgtagaatctgtaagtagatatttggagcgctttgaggcttatgttggaaaaggaaatatcttcacataaaaactagacagaagcattctcagaaacttctttgtgataagtgcattcaactcacagagtcgaacctttctgttgatagagcagttttaaatcactctttttctagaatctgaaagtggatatttggagtgctctgaggcctatggtggaaaaggaaatacctacacataaaaactaggcggaagcattctcagaaatatctttgtgatgagtgcattcaactcacagagttgaacacttatgttgatagaggagttttaaaacactctttttcaggaatctgaaagtggatatttggagcgctttgaggcctatggtggaaaaggaaacacctcacaaaaaaaactagagcagaagcattctcagaaacttctttgtgatgtgtgcattcaactcacagagttgaatctttttctttgatagaggagttttgaaacactatttttgtacaatctgcggttggatatttggagcgctttgatgcctacggtggaaaacgaaatatccgcacataaaatctagacagccagcattctcagaaacttgtttgtgttgtgtgcattcaactcacagagttgaacctttcctttgattgagcagttttgaaaaagtctttttgtagaatctacaagtggatatttgaagcacattgaagcctatgatggaaaaggaaatatcttcacatacaaactagacagagcattctcagaaacttctttgtgttgtgtgcattcaactcacagagttgaacttttcctatgattgagcagttttgaaacactctttctgaagaatctgcaagtggatatttggagcgctttgaggcctatggtgcaaaaggaaacaccttcacaaaaaaactagagcagaagcattctcagaaacgtctttgtgatgtgtgcattcaactcacagagttgaacctttctttgatagagcagttttgaaacactctttttgtagaatctgcagttggatatttggagcgctttgatgcctatggtggaaaaggaaatatccgcacataaaaactagacagcagcattctcagaaacttgtttgtgttctgtgcattcaactcacagagttgagctttcctttgattgagcagttttgaaaaagtctttttgcagaatctgcaagtggatatttggagcggtttgaggcctgtggtgtaaaaggaaatatcttcacataaaaactagacagaagcattctctgaaacttctttgtgatgtgtgaattcaactcacagagttgaacctttcttttgtagagcagttttgaaactctttttgtagaatctgtaagtagatatttggagcgctttgaggcttatggtggaaaaggaaatatcttcacttaaaaactagacagaagcattctcagaatcttctttgtgataagtgcattcaactcacagagtcgaacctttctgttgatagagcagttttaaatcactcattttctagaatctgaaagtggatatttggagtgctctgaggcctatggtggaaaaggaaatacctacacataaaaactaggcggaagcattctcagaaatatctttgtgatgagtgcattcaactcacagagttgaacatttatgttgatagaggacttttaaaagactctttttcaggaatctgaaagtggatatttggagcgctttgaggcctatggtggaaaaggaaacaccttcacaaaaaaaactagagcagaagcattctcagaaacttctttgtgatgtgtgcattcaactcacagagttgaacctttttttttgatagagcagttttgaaacactatttttgtacaatgtgcggttggatgtttggagcgctttgatgcctatggtggaaaacgaaatatccgcacataaaatctagacagcagcattctcagaaacttgtttgtgttgtgtgcattcaactcacagagttgaacctttcctttgattgagcagttttgaaaaagtctttttgtagaatccacaagtggatatttggagcagtttgaggcctatggtgtaaaaggaaatatcttcacataaaaactagacagaagcattctcagaaacttctttgtgttgtgtgtattcaactcacagagttgaaattttcctttgattgagcagttttgaaacactctttttgtagaatctgcaagtggatatttggagtgctttgaggcctatggtggaaaaggaaacaccttcacataaaaagtagagcagaagcattctcagaaacgtctttgtgatgtgtgcattcaactcacagagttgaacctttctttgatagagcagttttgaaacactctttttgtagaatctgcagttggatatttggagcgctttgatgcctatggtggaaaaggaaatatccgcacataaaaactagacagcagcattctcagaaacttgtttgtgttgtgtgcattcaactcacagagttgagctttcctttgattgagcagttttgaaaatgtctttctgcagaatctgcaagtggatatttggagcggtttgaggcctatggtgtaaaaggaaatatcttcacataaaaactagacagaagcattctctgaaacttctttgtgatgtgtgaattcaactcacagagttgaacctttcttttgtagagcagttttgaaactctttttgtagaatctgtatgtagatatttggagcgctttgaggcttatggtggaaaaggaaatatcttcacataaaaactagacagaagcattctcagaaacttctttgtgataagtgcattcaactcacagagtcgaacctttctgttgatagagcagttttaaatcactctttttctagaatctgaaagtggatatttggagtgctctgaggcctatggttgaaaaggaaatacctacacataaaaactaggcggaagcattctcagaaacttctttgtgatgtgtgcattcaactcacagatttgaacctttctgttgatagagcagttttaaaacactctttttctggaatctgaaagtggatatttggagcgctttgaggcctatagtggaaaaggaaacacctttacaaaaaaactatagcagaagcattctcagaaagttctttgtgttgtgtgcattcaactcacagagttgaacctttttttttgatagagcagttttgaaacactatttttgtacaatctgcggttggatatttggagcgctttgatgcctatggtggaaaacgaaatatccgcacataaagtctagacagcnnnnnnnnnnnnnnnnnnnnnnnnnnnnnnnnnnnnnnnnnnnnnnnnnnnnnnnnnnnnnnnnnnnnnnnnnnnnnnnnnnnnnnnnnnnnnnnnnnnntagcaaagacttggaactaaaccaaatgtctaacaatgatagactggattaagaaaatgtggcacatatgaactttctttttcatagagcagttttgaaacactctttttgtagaatctgcaagtggacatttggagcactttgaggtatatggtagaaaaggaaatatcttcatataaaaactagacagaagagcattctcagaaacttctttgtgttgtgtgcattcaactcacagagttgaacttttcctatgattgagcagttttgaaacactctttctgaagaatctgcaagtggatatttggagcgctttgaggcctatggtggaaaaggaaacaccttcacaaaaaaactagagcagaagcattctcagaaacgtctttgtgatgtgtgcattcaactcacagagttgaacctttctttgatagagcagttttgaaacactcttgttgtagaatctgcagttggatatttggagcactttgatgcctatggtggaaaaggaaatatccgcccataaaaactagacagcagcattctcagaaacttgtttgtgttgtgtgcattcaactcacagagttgacctttcctttgattgagcagttttgaaaaagtctttttgcagaatctgcaagtgaatatttggagcgttttgaggcctatggtgtaaaaggaaatatcttcacataaaaactagacagaagtattctcagaaagttctttgcgatgtgtgaattcaactcacagagttgaacctttctttcatagagcagttttgaaacactctttttatagaatctgcaagtagatatttggagcgctttgaggcttatagtagaaaaggaaatatcttcacataaaaactagacagaagcatgctcagaaacttctttgtgataagtgcattcaactcacagagtcgaacctttctgttgatagagcagttttaaatcactctttttctagaatctgaaagtggatatttggagtgctttgtggcctatggtggaaaaggaaatacctacccataaaaactaggcggaagcatactcagaagtatctttgtgatgagtgcattcaactcacagagttgaacacttatgttgatagaggagttttaaaacactctttttcaggaatctgaaagtggatatttggagcgctttgaggcctatggtggaaaaggaaacaccttcacaaaaaaaactagagcagaagcattctcagaaacttcgttgtgatgtgtgcattcaactcacagagttgaacctttttatttgatagagcagttttgaaacactttttttgtacaatctgcggttggatatttggagcgctttgatgcctatggtggaaaacgaaatatccgcacataaaatctagacagcagcattctcagaaacttgttcgtgttgtgtgcattcaactcacagagttgaacctttcctttgattgagcagttttgaaaaagtctttttgtagaatccacaagtggatatttggagcagtttgaggcctatggtgtaaaaggaaatatcttcacataaaaactagacagaagcattctcagaaacttctttgtgttgtgtgcattcaactcacaaagttgaacttttcctatgattgagcagttttgaaacactctttctgaagaatctgcaagtggatatttggagtgctttgaggtctatggtggaaaagcaaacaccttcacaaaaaaaactagagcagaagcattctcagaaacgtctttgtgatgtgtgcattcaactcacagagttgaacctttgtttgatagagtagttttgaaacactctttttgtagaatctgcagttggatatttggagcgctttgatgcctatggtggaaaaggaaatatccgcacataaaaactagacagcagcattctcagaaacttgtttgtgttgtatgcattcaactcacagagttgacctttcctttgattgagcagttttgaataagtctttttgcagaatctgcaagtggatatttggagcggtttgaggcctatggtgtaaaaggaaatatcttcacataaaaactagacagaagcattctctgaaacttctttgtgatgtgtgaattcaactcacagagttgaacctttcttttgtagagcagttttgaaactctttttgtagaatctgtaagtagatatttggagcgctttgaggcttatggtggaaaaggaaatatcttcacttaaaaactagacagaagcattctcagaaacttctttgtgataagtgcattcaactcacagagtcgaacctttctgttgatagagcagttttaaatcactctttttctagaatctgaaagtggatatttggagtgctctgaggcctatggtggaaaaggaaatacctacacataaaaactaggcggaagcattctcagaactatctttgtgatgagtgcattcaactcacagagttgaacatttatgttcatagaggagttttaaaacactctttttcaggaatctgaaagtggatatttggagcgctttgaggcctatggtggaaaaggaaacaccttcacaaaaaaactagagcggaagcattctcagaaacttctttgtgatgtgtgcattcaactcacagagttgaacctttttttttgatagagcagttttgaaacactatttttgtacaatctgcggttggatatttggagcgctttgatgcctgtggtggaaaacgaaatatccgcacataaaatctagacagcagcattctcagaaacttgtttgtgttgtgtgcattcagctcacagagttgaacctttcctttgactgagcagttttgaaatagtcgttttgtagaatccacaagtggatatttggagcagtttgaggcctatggtgtaaaaggaaatatcttcacataaaaactagacagaagcattctcagaaacttgtttgtgttgtgtgcattcaactcacagagttgaaactttcctttgattgagcagttttgaaaaagtccttttgcagaatctgcaagtggatatttggagcgtttgaggcctatggtgtaaaaggaaatatcttcacatagaaactagacagaagcattctctgaaacttctttgtgatgtgtgcattcaactcacagagttgaacctttcttttgtagagcagttttgaaacactctttttgtagaatctgcaattggatatttggagctctttgatgcctatggtgggaaaggaaatatccgcacataaaaagtagatagcagcattctcagaaacttgtttgtgttgtgtgcattcaactcacagagttgaacctttcctttgattgagcagttttgaaaaagtctttttgtagaatctacaagtggatatttgaagcacattgaagcctatgatggaaaaggaaatatcttcacatacaaactagacagaagcattctcagaaacttctttgtgttgtgtgcattcaactcacaaagttgaacttttcctatgattgagcagttttgaaacactctttctgaagaatctgcaagtggatatttggagtgctttgatgtctatggtggaaaagcaaacaccttcacaaaaaaaactagagcagaagcattctcagaaacgtctttgtgatgtgtgcattcaactcacagagttgaacctttctttgatagagcagttttgaaacactctttttgtagaatctgcagttggatatttggagcgctttgatgcctatggtggtaaaggaaatgtccgcccataaaaactagacagcagcattctcagaaacgtgtttgtgttgtgtgcattcaactcacagagttggactttcctttgattgagcagttttgaaaatgtctttttgcagaatctgcaagtggatatttggagcggtttgaggcctatggtgtaaaaggaaatatcttcacataaaacgtagacagaagcattctctgaaacttctttgtgatgtgtgaattcaactcacagagttgaacctttcttttgtagagcagttttgaaactctttttgtagaatctgtaagtagatatttggagcgctttgaggcttatggtggaaaaggaaatatcttcacataaaaactagacagaagcattctcagaaactcctttgtgataagtgcattcaactcacagagtcgaacctttctgttgatagagcagttttaaatcactctttttctagaatctgaaagtggatatttggagtgctctgaggcctatggtggaaaaggaaatacctacacataaaaactaggcggaagcattctcagaaatatctttgtgatgagtgcattcaactcacagagttgaacatttatgttgatagaggagttttaaaacactctttttcaggaatctgaaagtggatatttggagcgctttgaggcctatggtggaaaaggaaacaccttcagaaaaaaaaactagagcagaagcattctcaggaacttctttgtgatgtgtgcattcaactcacagagttgaacctttttttttgatagagcagttttgaaacactatttttgtacaatctgcggttggatatttggagcgctttgatgcctatggtggaaaacgaaatatccgcacataaaatctagacagcagcattctcagaaacttgattgtgttgtgtgcattcaactcacagagttgaacctttcctttgattgagcagttttgaaaaagtctttttgtagaatccacaagtggatatatggagcagtttgaggcctatggtgtaaaaggaaatatcttcacataaaaactagacagaagcattctcagaaacttctttgtgttgtgtgcattcaactcacagagttgaacttttcctatgattgagcagttttgaaacactctttctgaagaatctgcaagtggatatttggagcgctttgaggcctatggtggaaaaggaaacaccttcacaaaaaaactagagcagaagcattctcagaaacgtctttgtgatgtgtgcattcaactcacagatttcaacctttctttgatagagcagttttgaaacactctttttgtagaatctgcagttggatatttggagcgctttgatgcctatggtggaaaaggaaatatccgcacataaaaactagacagcagcattctcagaaacttgtttgtgttgtgtgcattcaactcacagagttgagctttcctttgattgagcagttttgaaaaagtctttttgcagaatctgcaagtggatatttggagcggtttgaggcctatggtgtaaaaggaaatatcttcacataaaaactagacagaaggattctctgaaacttgtttgtgatgtgtgaattcaactcgcagagttgaacctttcttttgtagagcagttttgaaactctttttgtagaatctgtacgtagatatttggagcgctttgaggcttatggtggaaaaggaaatatcttcacataaaaactagacagaagcattctcagaaacttctttgtgataagtgcattcaactcacagagtcgaacctttctgttgatagagcagtttaaaagcactctttttctaatatctgaaagtggatatttggagtgctttgtggcctatggtggaaaaggaaatacctacacataaaaactaggccgaagcattctcagaaatatctttgtgatgagtgcattcaactcacagagttgaacacttatgttgatagaggagttttaaaacactctttttcaggaatctgaaagtggatatttggagcgctttgaggcctgtggtggaaaaggaaacacattcacaaaaaaaactacagcagaagcattctcagaaacttcgttgtgatgtgtgcattcaactcacagagttgaacctttttatttgatagagcagttttgaaacactatttttgtacaatctgcggttggatatttggagcgctttgatgcctatggtggaaaacgaaatatccgcacataaaatctagacagcaacattctcagaaacttgtttgtgttgtgtgcattcaactcacagagttgaacctttcctttgattgagcagttttgaaaaagtctttttgtagaatccacaagtggatatttggagcagtttgtggcctatggtgtaaaaggaaatatcttcacataaaaactagacagaagcattctcagaaacttctttgtgatgtgtgcattcaactcacagagttgaacttttcctatgattgagcagttttgaaacactctttctgaagaatctgcaagtggatatttggagcgctttgaggcctacggtggaaaaggaaacaccttcacaaaaaaactagagcagaagcattctcagaaacgtctttgtgatgtgtgcattcaactcacagagttgaacctttctttgatagagcagttttgaaacactctttttgtagaatctgcagttggatatttggagcgctttgatgcctatggtggaaaaggaaatatctgcacataaaaactagacagcagcattctcagaaacttgtttgtgttgtgtgcattcaactcacagagttgacctttcctttgattgagcagttttgaaaaagtctttttgcagaatctgcaagtggatatttgcagcggtttgaggcctatggtgtaaaaggaaatatattcacataaaaactagacagaagcattctctgaaacttctttgtgatgtgtgcattcaagtcacagagttgaacctttcttttgtagagcagttttgaaacactctttttgtagaatctgcaagtagatatatggagcgctttgaggcttacgatggaaaaggaaatatccgcacataaaaagtagacagcaacattctcagaaacttctttgtgataagtgcattcaactcacagagtcgaacctttctgttgatagaacagttttaaatcactctttttctagaatctgaaagtggatatttggagtgctttgaggcctatggtggaaaaggaaatacctacacataaaaactaggcggaatcattctcagaactatctttgtaatgagtgcattcaactcacagagttgaacatttatgttcatagaggagttttaaaacactctttttcaggaatctgaaagtggatatttgtagcgctttgaggcctatggtggaaaaggaaacaccttcacaaaaaaaaccagagcagaagcattctcagaaacttcgttgtgatgtgtgcattcaactcacagagttgaacctttttatttgatagagcagttttgaaacactatttttgtacaatctgcggttggatatttggagcgctttgatgcctatggtggaaaacgaaatatccgcacataaaatctagacagcagcattctcagaaacttgtttgtgttgtgtgcattcagctcacagagttgaacctttcctttgattgagcagttttgaaatagtctttttgtagaatccacaagtggatatttggagcagtttgaggcctatggtgtaaaaggaaatatcttcacataaaaactagacagaagcattctcagaaacttctttgtgttgtgtgcattcaactcacagagttgaacttttcctatgattgagcagttttgaaacactctttctgaagaatctgcaagtggatatttggagcgctttgaggcctatggtggaaaaggaaacaccttcacaaaaaaactagagcagaagcattctcagaaacgtctttgtgatgtgtgcattcaactcacagagttaaacctttctttgatagagcagttttgaaacactctttttgtagaatctgcagttggatatttggagcgctttgatgcctatggtggaaaaggaaatatccgcacataaaaactagacagcagcattctcagaaaattgtttgtgttgtgtgcattcaactcacagagttgagctttcctttgattgagcagttttgaaaaagtctttttgcagaatctgcaagtggatatttggagcggtttgaggcctatggtgtaaaaggaaatatcttcacataaaaactacacagaagcattctctgaaacttctttgtgatgtgtgaattcaactcacagagttgaacctttcttctgtagagcagttttgaaactctttttgtagaatctgtaagtagatatttggagcgctttgaggcttatggtggaaaaggaaatatcttcacataaaaactagacagaagcattctcagaaacttctttgtgataagtgcattcaactcacagagtcgaacctttctgttgatagaggagttttaaatcactctttttctagaatctgaaagtggatatttggagtgctctgaggcctatgatggaaaaggaaatacctacacataaaaactaggcggaagcattctcagaaatatctttgtgatgagtgcattcaactcacagagttgaacatttatgttgatagaggagttttaaaacactctttttcaggaatctgaaagtggatatttggagcgctttgaggcctatggtggaaaaggaaacaccttcacaaaaaaaactagagcagaagcattctcaggaacttctttgtgatgtgtgcattcaactcacagagttgaaccttttttttttgatagagcagttttgaaacactatctttgtacaatctgcggttggatatttggagcgctttgatgcctatggtggaaaacgaaatatccgcacataaaatctagacagcagcattctcagaaacttgtttgtgttgtgtgcattcaactcacagagttgaacctttcctttgattgagcagttttgaagaagtctttttgtagaatccaaaagtggatatatggagcagtttgaggcctatggtgtaaaaggaaatatcttcacataaaaactagacagaagcattctcagaaacttctttgtgttgtgtgaattcaactcacagagttgaacttttcctatgattgagcagttttgaaacactctttctgaagaatctgcaagtggatatttggagcgctttgaggcctacggtggaaaaggaaacaccttcacaaaaaaactagagcagaagcattctcagaaacgtctttgtgatgtgtgcattcaactcacagagttgaacctttctttgatagagcagttttgaaacactctttttgtagaatctgcagttggatatttggagcgctttgatgcctacggtggaaaaggaaatatccgcacataaaaacaagacagcagcattctcagaaacttgtttgtgttgtgtgcattcaactcacagagttgacctttcctttgattgagcagttttgaaaaagtctttttgcagaatctgcaagtggatatttggagcggtttgaggcctatggtgtaaaaggaaatatcttcacataaaaactagacagaagcattctctgaaacttctttgtgatgtgtgaattcaactcgcagagttgaacctttcttttgtagagcagttttgaaactctttttgtagaatctgtaagtagatatttggagcgctttgagtcttatggtggaaaaggaaatatcttcacataaaatctagacagaagcattctcagaaacttctttgtgataagtgcattcaactcacagagtcgaacctttctgttgatagagcagttttaaatcactctttttctagaatctgaaactggatatttggagtgctttgaggcctattgtggaaaaggaaatacctacacataaaaaagaggcggaagcattctcagaaatatctttgtgatgagtgcattcaactcacagagttgaacatttatgttgatagaggagttttaaaacactctttttcaggaatctgaaagtggatatttggagcgctttgaggactttggtggaaaaggaaacaccttcacaaaaaaaactagagaagaagcattctcagaaacttctttgtgatgtgtgcattcaactcacagagttgaaactttttttttgatagagcagttttgaaacactatttttgtacaatctgccgttggatatttggatcgctttgatgcctaaggtggaaaacgaaatatccgcacataaaatctagacagcagcattctcagaaacttgtttgtgttgtgtgcattcaactcacagagttgaacctttcctttgattgagcagttttgaaaaagtctttttgtagaatctacaagtggatatttgaagcacattgaagcctatgatggaaaaggaaatatcttcacatacaaactagacagaagcattctcagaaacttctttgtgttgtgtgcattcaactcacagagttgaacttttcctatgattgagcagttttgaaacactctttctgaagaatctgcaagtggatatttggagcgctttgaggcctatggtggaaaaggaaacaccttcacaaaaaaactagagcagaagcattctcagaaacgtctttgtgatgtgtgcattcaactcacagagttgaacctttctttgatagagcagttttgaaacactctttttgtagaatctgcagttggatatttggagcgctttgatgcctatggtggaaaaggaaatatccgcacataaaaactagacagcagcattctcagaaacttgtttgtgttgtgtgcattcaactcacagagttgagctttcctttgattgagcagttttgaaaatgtctttttgcagaatctgcaagtggatatttggagcggtttgaggcctatggtgtaaaaggaaatatcttcacataaaaactagacagaagcattctctgaaacttctttgtgatgtgtgaattcaactcacagagttgaacctttcttttgtagagcggttttgaaactctttttgtagaatgtgtaagtagatatttggagcgctttgaggcttatggtggaaaaggaaatatcttcacataaaaactagacagaagcattctcagaaacttctttgtgataagtgcattcaactcacagagtcgaagctttctgttgatagagcagttttaaatcactctttttctagaatttgaaattggatatttagagtgctttgaggcctatggtggaaaaggaaatacctacacataaaaactaggcggaagcattctcagaaatatctttgtgatgagtgcattcaactcacagagttgaacatttatgttgatagaggagttttaaaacactctttttcaggaatctgaaagtggatatttggagcgctttgaggcctatggtggaaaaggaaacaccatcacaaaaataaactagagcagaagcatcctcaggaacttctttgtgatgtgtgcattcaactcacagagttgaaccttttttttggatagagcagttttgaaacactatttttgtacaatctgcggttggatatttggagcgctttgatgcctatggtggaaaacgaaatatccgcatataaaatctagacagcagcattctcagaaacttgtttgtgttgtgtgcattgaactcacagagttgaacctttcctttgattgagcagttttgaaaaagtctttttgtagaatccacaagtggatatttggagcagtttgaggcctatggtgtaaaaggaaatatcttcacataaaaactagacagaagcattctcagaaacttctttgtgttgtgtgcattcaactcacagagttgaacttttcctatgattgagcagttttgaaacactctttctgaagaatctgcaagtggatatttggagcgctttgaggcctatggtggaaaaggaaacaccttcacaaaaaaactagagcagaagcattctcagaaacgtctttgtgatgtgtgcattcaactcacagagttgaacctttctttgatagagcagttttgaaacactctttttgtagaatctgcagttggagatttggagcgctttgatgcctatggtggaaaaggaaatatccgcacataaaaactagacagcagcattctcagaaacttgtttgtgttgtgtgcattcaactcacagagttgagctttcctttgattgagcagttttgaaaatgtctttttgcagaatctgcaagtggatatttggagcggtttgaggcctatggtgtaaacggaaatatcttcacataaaaactagacagatgcattctctgaaacttctttgtcatgtgtgaattcaactcacagagttgaaccattcttttgtagagcagttttgaaactctttttgtagaatctgtaagtagatatttggagcgctttgaggcttattgtggaaaaggaaatatcttcacataaaaactagacagaagcattctcagaaacttctatgtgataagtgcattcaactcacacagtcgaacctttctgttgatagagcagttttaaatcactctttttctagaatctgaaagtggatatttggagtgctttgaggcctatggtggaaaaggaaatacctacacataaaaactagtcagaagcatactcagaagtatctttgtgatgagtgcattcaactcacagagttgaacacttatgttgatagaggagttttaaaacactctttttcaggaatctgaaagtggatatttggagcgctttgaggcctatggtggaaaaggaaacaccttcacaaaaaaaactagagcagaagcattctcaggaacttctttgtgatgtgtgcattcaactcacagagttgaacctttttttttgatagagcagttttgaaacactatttttgtacaatctgcggttggatatttggagcgctttgatgcctatggtggaaaacgaaatatctgcagataaaatctagacagcaatgatgatttccaatttcatccatgtccctgcaaaggacatgaacttatcattttttacggctgcatagtattccatggtgcatatgtgcggcattattcacaatagcaaagacttggaactaaaccaaatgtctaacaatgatagactggattaagaaaatgtggcacatatgaaccttctttttcatagaccagttttgaaacactctttttgtagaatctgcaagtggacatttggagcactttgaggtatatggtagaaaaggaaatatcttcacataaaaactagacagaagnnnnnnnnnnnnnnnnnnnnnnnnnnnnnnnnnnnnnnnnnnnnnnnnnnnnnnnnnnnnnnnnnnnnnnnnnnnnnnnnnnnnnnnnnnnnnnnnnnnnagcattctcagaaacttctttgtgttgtgtgcattcaactcacagagttgaacttttcctatgattgagcagttttgaaacactctttctgaagaatctgcaagtggatatttggagcgctttgaggcctatgctggaaaaggaaacaccttcacgaaaaaactagagcagaagcattctcagaaacgtctttgtgatgtgtgcattcaactcacagagttgaacctttctttgatagagcagttttgaaacactctttttgtagaatctgcagttggatatttggagcgctttgatgcctacggtggaaaaggaaatatccgcacataaaaacaagacagcagcattctcagaaacttgtttgtgttgtgtgcattcaactcacagagttgacctttcctttgattgagcagttttgaaaaagtctttttgcagaatctgcaagtggatatttggagaggtttgaggcctatggtgtaaaaggaaatatcttcacataaaaactagacagaagcattctctgaaacttctttgtgatgtgtgaattcaactcacggagttgaacatttatttgtagagcagttttgaaactctttttgtagaatctgtaagtaggtatttggggcgctttgaggcttatggtggaaaaggaaatatcttcacataaaaactagacagaagcattctcagaaacttctttgtcataagtgcattcaactcacagagtcgaacctttctgttgatagagcagttttaaatcactctttttctagaatctgaaagtggatatttggagtgctttgaggcctatggtggaaaaggaaatacctacacataaaaactaggcgtaagcattctcagaaatatctttgtgatgagtgcattcaactcacagagttgaacacttatgttgatagaggagttttaaaacactctttttcaggaatctgaaagtggatatttggagcgctttgaggcctatggtggaaaaggaaacaccttcacaaaaaaaactagagcagaagcattctcagaaacttctttgtgatgtgtgcattcaactcacagagttgaacctttttttttgatagagcagttttgaaacacaatttttgtacaatctgcggttggatatttggagcgctttgatgcctatggtggaaaacgaaatatccgcacataaaatctagacagcagcattctcagaaacttgtttgtgttgtgtgcattcaactcacagagttgaacctttcctttgattgagcagttttgaaaaagtctttttgtagaatccacaagtggatatttggagcagtttgaggcctatggtgtaaaaggaaatatcttcacataaaaactagacagaagcattctcagaaacttctttgtgttgtgtgcattcaactcacagagttgaacttttcctatgattgagaagttttgaaacactctttctgaagaatctgcaagtggatatttggagcgctttgaggcctatggtggaaaaggaaacaccttcacaaaaaaactagagcagaagcattctcagaaacgtctttgtgatgtgtgcattcaactcacagagttgaacctttctttgatagagcagttttgaaacactctttttgtagaatctgcagttggatatttggagcgctttcatgcctatggtggaaaaggaaatatccgcacataaaaactagacagcagcattctcagaaacttgtttgtgttgtatgcattcaactcacagagttgacctttcctttgattgagcagttttgaataagtctttttgcagaatctgcaagtggatatttggagcggtttgaggcctatggtgtaaaaggaaatatcttcacataaaaactagacagaagcattctctgaaacttctttgtgatgtgtgaattcaaatcacagagttgaacctttcttttgtagagcagttttgaaactctatttgtagaatctgtaagtagatatttggagcgctttgaggcttatggtggaaaaggaaatatcttcacataaaaactagacagaagcattctcagaaacttctttctgataagtgcattcaactcacagagtcgaacctttctgttgatagagcagttttaaatcactctttttctagaatctgaaagtggatatttggagtgctttgaggcctatggtggaaaaggaaatacctacacataaaaactaggtggaagcattctcagaagtatctttgtgatgagtgcattcaactcacagagttgaacacttatgttgatagaggagttttaaaacattctttttcaggaatctgaaggtggatatttggagcgctttgaggcctatggtggaaaaggaaacaccttcacagaaaaaactagagcagaagcattctcagaaacttctttgtgatgtgtgcattcaactcacagagttgaacctttttttttgatagagcagttttgaaacactatttttgtacaatctgcggttggatatttggagcgctttgatgcctatggtggaaaacgaaatatccgcacataaaatctagacgagcagcattctcagaaacttgtttgtgttgtgtgcattcagctcacagagttgaacctttcctttgattgagcagttttgaaatagtctttttgtagaatccacaagtggatatttggagcagtttgaggcctatggtgtaaaaggaaatatcttcacataaaaactagacagaagcattctcagaaacttctttgtgttgtgtgcattcaactcacagagttgaacttttcctatgattgagcagttttgaaacactctttcggaagaatctgcaagtggatatttggagcgctttgaggcctgtggtggaaaaagaaacaccttcacaaaaaaactagagcagaagctttctcagaaacgtctttgtgatgtgtgcattcaactcacagagttgaacctttctttgatagagcagttttgaaacactctttttgtagaatctgcagttggatatttggagcgctttgatgcctatggtggaaaaggaaatatccgcacataaaaactagacagcagcattctcagaaacttgtttgtgttgtgtgcattcaactcacagagttgagctttcctttgattgagcagttttgaaaaagtctttttgcagaatctacaagtggatatttggagcggtttgaggcctatggtgtaaaaggaaatatcttcacataaaaactagacagaagcattctctgaaacttctttgtgatgtgtgaattcaactcgcagagtggaacctttcttttgtagagcagttttgaaactctttttgtagaatctgtaagtagatatttggagcgctttgaggcttacggtggaaaaggaaatatcttcacattaaaactagacagaagcattctcagaaacttctttgtgataagttcattcaactcacagcagtcgaacctttctgttgatagagcagttttaaatcactctttttctagaatctgaaagtggatatttggagtgctctgaggcctatggtggaaaaggaaatgcctacacataaaaactaggcggaagcattctcagaaatatctttgtgatgagtgcattcaactcacagagttgaacatttatgttcatagaggagttttaaaacactctttttcaggaatctgaaagtggatatttggagcgctttgaggcctatggtggaaaaggaaacacctacacaaaaaaaactagagcagaagcattctcagaaacttctttgtgatgtgtgcattcaactcacagagttgaacctttttttttgatagagcagttttgaaacactatttttgtacaatctgcggttggatatttggagggctttgatgcctatggtggaaaacgaaatatccgcacataaaatctagacagcagcattctcagaaacttgtttgtgttgtgtgcattcaactcacagagttgaacctttcctttgattgagcagttttgaaaaagtctttttgcagaatctgcaagtggatatttggagcggtttgaggcctatggtgtaaaaggaaatatcttcacataaaatctagacggaagcattctctgaaacttctttgtgatgtgtgaattcaactcgcagagttgaacctttcttttgtagagcagttttgaaactctttttgtagaatctgtaagtagatatttggagcgctttgaggcgtatggtggaaaagcaaatatcttcacataaaaactagacagaagcattctcagaaacttctttgtgataagtgcattcaactcacagagtcgaacctttctgttgatagagcagttttaaatcactctttttctagaatctgaaagtggatatttggagtgctttgaggcctatggtggaaaaggaaatacctacacataaaaactaggcgtaagcattctcagaactatctttgtgatgagtgcattcaactcacagagttgaacatttatgttgatagaggacttttaaaagactctttttcagtaatctgaaagtggatatttggagcgctttgaggcctatggtggaaaaggagacaccttcacaaaaaaaactagagcacaagcattctcagaaacttctttgtgatgtgtgcattcaactcacagagttgaacctttttttttcatagagcagttttgaaacactatttttgtacaatctgcggttggatatttggagcgctttgatgcctatggtggaaaacgaaatatccgcacataaaatctagacagcagcattctcagaaacttgtttgtgttgtgtgcattcaactcacatagttgaacctttcctttgattgagcagttttgaaaaagtctttttgtagaaaccacaagtggatatttggagcagtttgaggcctatagtgtaaaaggaaatatcttcacataaaaactagacagaagaattctcagaaacttctttgtgttgtgtgtattcaactcacagagttgaaattttcctttgattgagcagttttgaaacactctttttgtagaatctgcaagtggatatttggagtgctttgaggcctatggtggaaaaggaaacaccttcccataaaaagtagagcagaagaattctcagaaacttctttgtgatgtgtgcattcaactctttgagttttttgatagagcagttttgaaacactatttttgtagaatctgcaattggatatttggagggctttgatgcctaccgtggaaaaggaaatatccacacataaaaactagacagcagcatgctcagaaacttgtttgtgttgtgtgcattcaactcacagagttgacctttcctttgattgagcagttttgaaaaagtctttttgtagaatctgcaagtggacatttggagcggtttaaggcctatggtgtaaaaggaaatatcttcacataaagactagacagaagcattctctgaaacttctttgtgatgtgtgaattcaactcacagagttgaacctttcttttgtagagcagttttgaaactctttttgtagaatctgtaagtagatatttggagcgctttgaggcttatggtggaaaaggaaatatcttcacataaaaactagacagaagcattctcagaaacttctttgtgataagtgcattcaactcagagagtcgaacctttctgttgatagagcagttttaaatcactgtttttctagaatctgaaagtcgatatttggagtgctttgaggcctatggtggaaaaggaaatacctacacataaaaactaggcggaagcattctcagaaatatctttgtgatgagtgcactcaactcacggagttgatcatttctttgatagaggagttttaaaacactctttttctggaatctcaaagtggatatttggagcgctttaaggcctatggtggaaaaggaaacaccttcacaaaaaaactagagcagaagcattctcagaaacttgtttctgttgtgtgcattcaactcacagagttgaacctttttatttgatagagcagttttgaaacactatttttgtacaatctgcggttggatatttggagcgctttgatgcctatggtggaaaaggaaatatccgcacataaaatctagacagcagcattctcagaaacttgtttgtgttgtgtgcattcaactcacagagttgaacctttcctttcaatgagcagttttgaaaaagtctttttgtagaatccacaagtggatatttggagcagtttgaggcctatgatgtaaaaggaaatatcttcacataaaaactagacagaagcattctcagaaacttctttgtgttgtgtgcattcaactcacagagttgaacttttcctatgattgagcagttttgaaacactctttctgaagaatctgcaagtggatatttggagcgctttgaggcctatggtggaaaaggaaacaccttcacaaaaaaactagagcagaagcattctcagaaacgtctttgtgatgtgtgcattcaactcacagagttgaacctttctttgatagagcagttttgaaacactctttttgtagaatctgcagttggatatttggagcgctttgatgcctatggtggaaaaggaaatatccgcacataaaaactagacagcagcagtctcagaaacttgtttgtgttgtgtgcattcaactcacagagttgagctttcctttgattgagcagttttgaaaaagtctttttgctgaatctgcaagtggatatttggagcggtttgaggcctatggtgtaaaaggaaatatcttcacataaaaactagacagaagcattctccgaaacttgtttgtgttgtgtgcattcaactcacagagttgaacctttctttcgtagagcagttttgaaacactctttttgtagaatctgcaagtagatatttggagcgctttgaggcttatggtgcaaaaggaaatatcttcacatacaaactagacagaagcattctcagaaacttctttgtgataagtgcattcaactcacagagtcgaacctttctgttgatagaggagttttaaatcactctttttctagaatctgaaagtggatatttggagtgctctgaggcctatggtggaaaaggaaatacctacacataaaaactaggcggaagcattctcagaagtatctttgtgatgagtgcattcaactcacagagttgaacacttatgttgatagaggagttttaaaacactctttttcaggaatctgaaagtggatatttggagcgctttgaggcctatggtggaaaaggaaacaccttcacaaaaaaaactagagcagaagcattctcaggaacttctttgtgatgtgtgcattcaactcacagagttgaacctttttttctgatagagcagttttgaaacactatttttgtacaatctgcggttggatatttggagcgctttgatgcctatggtggaaaacgaaatatccgcacataaaatctagacagcnnnnnnnnnnnnnnnnnnnnnnnnnnnnnnnnnnnnnnnnnnnnnnnnnnnnnnnnnnnnnnnnnnnnnnnnnnnnnnnnnnnnnnnnnnnnnnnnnnnnnnnnnnnnnnnnnnnnnnnnnnnnnnnnnnnnnnnnnnnnnnnnnnnnnnnnnnnnnnnnnnnnnnnnnnnnnnnnnnnnnnnnnnnnnnnnnnnnnnnnnnnnnnnnnnnnnnnnnnnnnnnnnnnnnnnnnnnnnnnnnnnnnnnnnnnnnnnnnnnnnnnnnnnnnnnnnnnnnnnnnnnnnnnnnnnnnnnnnnnnnnnnnnnnnnnnnnnnnnnnnnnnnnnnnnnnnnnnnnnnnnnnnnnnnnnnnnnnnnnnnnnnnnnnnnnnnnnnnnnnnnnnnnnnnnnnnnnnnnnnnnnnnnnnnnnnnnnnnnnnnnnnnnnnnnnnnnnnnnnnnnnnnnnnnnnnnnnnnnnnnnnnnnnnnnnnnnnnnnnnnnnnnnnnnnnnnnnnnnnnnnnnnnnnnnnnnnnnnnnnnnnnnnnnnnnnnnnnnnnnnnnnnnnnnnnnnnnnnnnnnnnnnnnnnnnnnnnnnnnnnnnnnnnnnnnnnnnnnnnnnnnnnnnnnnnnnnnnnnnnnnnnnnnnnnnnnnnnnnnnnnnnnnnnnnnnnnnnnnnnnnnnnnnnnnnnnnnnnnnnnnnnnnnnnnnnnnnnnnnnnnnnnnnnnnnnnnnnnnnnnnnnnnnnnnnnnnnnnnnnnnnnnnnnnnnnnnnnnnnnnnnnnnnnnnnnnnnnnnnnnnnnnnnnnnnnnnnnnnnnnnnnnnnnnnnnnnnnnnnnnnnnnnnnnnnnnnnnnnnnnnnnnnnnnnnnnnnnnnnnnnnnnnnnnnnnnnnnnnnnnnnnnnnnnnnnnnnnnnnnnnnnnnnnnnnnnnnnnnnnnnnnnnnnnnnnnnnnnnnnnnnnnnnnnnnnnnnnnnnnnnnnnnnnnnnnnnnnnnnnnnnnnnnnnnnnnnnnnnnnnnnnnnnnnnnnnnnnnnnnnnnnnnnnnnnnnnnnnnnnnnnnnnnnnnnnnnnnnnnnnnnnnnnnnnnnnnnnnnnnnnnnnnnnnnnnnnnnnnnnnnnnnnnnnnnnnnnnnnnnnnnnnnnnnnnnnnnnnnnnnnnnnnnnnnnnnnnnnnnnnnnnnnnnnnnnnnnnnnnnnnnnnnnnnnnnnnnnnnnnnnnnnnnnnnnnnnnnnnnnnnnnnnnnnnnnnnnnnnnnnnnnnnnnnnnnnnnnnnnnnnnnnnnnnnnnnnnnnnnnnnnnnnnnnnnnnnnnnnnnnnnnnnnnnnnnnnnnnnnnnnnnnnnnnnnnnnnnnnnnnnnnnnnnnnnnnnnnnnnnnnnnnnnnnnnnnnnnnnnnnnnnnnnnnnnnnnnnnnnnnnnnnnnnnnnnnnnnnnnnnnnnnnnnnnnnnnnnnnnnnnnnnnnnnnnnnnnnnnnnnnnnnnnnnnnnnnnnnnnnnnnnnnnnnnnnnnnnnnnnnnnnnnnnnnnnnnnnnnnnnnnnnnnnnnnnnnnnnnnnnnnnnnnnnnnnnnnnnnnnnnnnnnnnnnnnnnnnnnnnnnnnnnnnnnnnnnnnnnnnnnnnnnnnnnnnnnnnnnnnnnnnnnnnnnnnnnnnnnnnnnnnnnnnnnnnnnnnnnnnnnnnnnnnnnnnnnnnnnnnnnnnnnnnnnnnnnnnnnnnnnnnnnnnnnnnnnnnnnnnnnnnnnnnnnnnnnnnnnnnnnnnnnnnnnnnnnnnnnnnnnnnnnnnnnnnnnnnnnnnnnnnnnnnnnnnnnnnnnnnnnnnnnnnnnnnnnnnnnnnnnnnnnnnnnnnnnnnnnnnnnnnnnnnnnnnnnnnnnnnnnnnnnnnnnnnnnnnnnnnnnnnnnnnnnnnnnnnnnnnnnnnnnnnnnnnnnnnnnnnnnnnnnnnnnnnnnnnnnnnnnnnnnnnnnnnnnnnnnnnnnnnnnnnnnnnnnnnnnnnnnnnnnnnnnnnnnnnnnnnnnnnnnnnnnnnnnnnnnnnnnnnnnnnnnnnnnnnnnnnnnnnnnnnnnnnnnnnnnnnnnnnnnnnnnnnnnnnnnnnnnnnnnnnnnnnnnnnnnnnnnnnnnnnnnnnnnnnnnnnnnnnnnnnnnnnnnnnnnnnnnnnnnnnnnnnnnnnnnnnnnnnnnnnnnnnnnnnnnnnnnnnnnnnnnnnnnnnnnnnnnnnnnnnnnnnnnnnnnnnnnnnnnnnnnnnnnnnnnnnnnnnnnnnnnnnnnnnnnnnnnnnnnnnnnnnnnnnnnnnnnnnnnnnnnnnnnnnnnnnnnnnnnnnnnnnnnnnnnnnnnnnnnnnnnnnnnnnnnnnnnnnnnnnnnnnnnnnnnnnnnnnnnnnnnnnnnnnnnnnnnnnnnnnnnnnnnnnnnnnnnnnnnnnnnnnnnnnnnnnnnnnnnnnnnnnnnnnnnnnnnnnnnnnnnnnnnnnnnnnnnnnnnnnnnnnnnnnnnnnnnnnnnnnnnnnnnnnnnnnnnnnnnnnnnnnnnnnnnnnnnnnnnnnnnnnnnnnnnnnnnnnnnnnnnnnnnnnnnnnnnnnnnnnnnnnnnnnnnnnnnnnnnnnnnnnnnnnnnnnnnnnnnnnnnnnnnnnnnnnnnnnnnnnnnnnnnnnnnnnnnnnnnnnnnnnnnnnnnnnnnnnnnnnnnnnnnnnnnnnnnnnnnnnnnnnnnnnnnnnnnnnnnnnnnnnnnnnnnnnnnnnnnnnnnnnnnnnnnnnnnnnnnnnnnnnnnnnnnnnnnnnnnnnnnnnnnnnnnnnnnnnnnnnnnnnnnnnnnnnnnnnnnnnnnnnnnnnnnnnnnnnnnnnnnnnnnnnnnnnnnnnnnnnnnnnnnnnnnnnnnnnnnnnnnnnnnnnnnnnnnnnnnnnnnnnnnnnnnnnnnnnnnnnnnnnnnnnnnnnnnnnnnnnnnnnnnnnnnnnnnnnnnnnnnnnnnnnnnnnnnnnnnnnnnnnnnnnnnnnnnnnnnnnnnnnnnnnnnnnnnnnnnnnnnnnnnnnnnnnnnnnnnnnnnnnnnnnnnnnnnnnnnnnnnnnnnnnnnnnnnnnnnnnnnnnnnnnnnnnnnnnnnnnnnnnnnnnnnnnnnnnnnnnnnnnnnnnnnnnnnnnnnnnnnnnnnnnnnnnnnnnnnnnnnnnnnnnnnnnnnnnnnnnnnnnnnnnnnnnnnnnnnnnnnnnnnnnnnnnnnnnnnnnnnnnnnnnnnnnnnnnnnnnnnnnnnnnnnnnnnnnnnnnnnnnnnnnnnnnnnnnnnnnnnnnnnnnnnnnnnnnnnnnnnnnnnnnnnnnnnnnnnnnnnnnnnnnnnnnnnnnnnnnnnnnnnnnnnnnnnnnnnnnnnnnnnnnnnnnnnnnnnnnnnnnnnnnnnnnnnnnnnnnnnnnnnnnnnnnnnnnnnnnnnnnnnnnnnnnnnnnnnnnnnnnnnnnnnnnnnnnnnnnnnnnnnnnnnnnnnnnnnnnnnnnnnnnnnnnnnnnnnnnnnnnnnnnnnnnnnnnnnnnnnnnnnnnnnnnnnnnnnnnnnnnnnnnnnnnnnnnnnnnnnnnnnnnnnnnnnnnnnnnnnnnnnnnnnnnnnnnnnnnnnnnnnnnnnnnnnnnnnnnnnnnnnnnnnnnnnnnnnnnnnnnnnnnnnnnnnnnnnnnnnnnnnnnnnnnnnnnnnnnnnnnnnnnnnnnnnnnnnnnnnnnnnnnnnnnnnnnnnnnnnnnnnnnnnnnnnnnnnnnnnnnnnnnnnnnnnnnnnnnnnnnnnnnnnnnnnnnnnnnnnnnnnnnnnnnnnnnnnnnnnnnnnnnnnnnnnnnnnnnnnnnnnnnnnnnnnnnnnnnnnnnnnnnnnnnnnnnnnnnnnnnnnnnnnnnnnnnnnnnnnnnnnnnnnnnnnnnnnnnnnnnnnnnnnnnnnnnnnnnnnnnnnnnnnnnnnnnnnnnnnnnnnnnnnnnnnnnnnnnnnnnnnnnnnnnnnnnnnnnnnnnnnnnnnnnnnnnnnnnnnnnnnnnnnnnnnnnnnnnnnnnnnnnnnnnnnnnnnnnnnnnnnnnnnnnnnnnnnnnnnnnnnnnnnnnnnnnnnnnnnnnnnnnnnnnnnnnnnnnnnnnnnnnnnnnnnnnnnnnnnnnnnnnnnnnnnnnnnnnnnnnnnnnnnnnnnnnnnnnnnnnnnnnnnnnnnnnnnnnnnnnnnnnnnnnnnnnnnnnnnnnnnnnnnnnnnnnnnnnnnnnnnnnnnnnnnnnnnnnnnnnnnnnnnnnnnnnnnnnnnnnnnnnnnnnnnnnnnnnnnnnnnnnnnnnnnnnnnnnnnnnnnnnnnnnnnnnnnnnnnnnnnnnnnnnnnnnnnnnnnnnnnnnnnnnnnnnnnnnnnnnnnnnnnnnnnnnnnnnnnnnnnnnnnnnnnnnnnnnnnnnnnnnnnnnnnnnnnnnnnnnnnnnnnnnnnnnnnnnnnnnnnnnnnnnnnnnnnnnnnnnnnnnnnnnnnnnnnnnnnnnnnnnnnnnnnnnnnnnnnnnnnnnnnnnnnnnnnnnnnnnnnnnnnnnnnnnnnnnnnnnnnnnnnnnnnnnnnnnnnnnnnnnnnnnnnnnnnnnnnnnnnnnnnnnnnnnnnnnnnnnnnnnnnnnnnnnnnnnnnnnnnnnnnnnnnnnnnnnnnnnnnnnnnnnnnnnnnnnnnnnnnnnnnnnnnnnnnnnnnnnnnnnnnnnnnnnnnnnnnnnnnnnnnnnnnnnnnnnnnnnnnnnnnnnnnnnnnnnnnnnnnnnnnnnnnnnnnnnnnnnnnnnnnnnnnnnnnnnnnnnnnnnnnnnnnnnnnnnnnnnnnnnnnnnnnnnnnnnnnnnnnnnnnnnnnnnnnnnnnnnnnnnnnnnnnnnnnnnnnnnnnnnnnnnnnnnnnnnnnnnnnnnnnnnnnnnnnnnnnnnnnnnnnnnnnnnnnnnnnnnnnnnnnnnnnnnnnnnnnnnnnnnnnnnnnnnnnnnnnnnnnnnnnnnnnnnnnnnnnnnnnnnnnnnnnnnnnnnnnnnnnnnnnnnnnnnnnnnnnnnnnnnnnnnnnnnnnnnnnnnnnnnnnnnnnnnnnnnnnnnnnnnnnnnnnnnnnnnnnnnnnnnnnnnnnnnnnnnnnnnnnnnnnnnnnnnnnnnnnnnnnnnnnnnnnnnnnnnnnnnnnnnnnnnnnnnnnnnnnnnnnnnnnnnnnnnnnnnnnnnnnnnnnnnnnnnnnnnnnnnnnnnnnnnnnnnnnnnnnnnnnnnnnnnnnnnnnnnnnnnnnnnnnnnnnnnnnnnnnnnnnnnnnnnnnnnnnnnnnnnnnnnnnnnnnnnnnnnnnnnnnnnnnnnnnnnnnnnnnnnnnnnnnnnnnnnnnnnnnnnnnnnnnnnnnnnnnnnnnnnnnnnnnnnnnnnnnnnnnnnnnnnnnnnnnnnnnnnnnnnnnnnnnnnnnnnnnnnnnnnnnnnnnnnnnnnnnnnnnnnnnnnnnnnnnnnnnnnnnnnnnnnnnnnnnnnnnnnnnnnnnnnnnnnnnnnnnnnnnnnnnnnnnnnnnnnnnnnnnnnnnnnnnnnnnnnnnnnnnnnnnnnnnnnnnnnnnnnnnnnnnnnnnnnnnnnnnnnnnnnnnnnnnnnnnnnnnnnnnnnnnnnnnnnnnnnnnnnnnnnnnnnnnnnnnnnnnnnnnnnnnnnnnnnnnnnnnnnnnnnnnnnnnnnnnnnnnnnnnnnnnnnnnnnnnnnnnnnnnnnnnnnnnnnnnnnnnnnnnnnnnnnnnnnnnnnnnnnnnnnnnnnnnnnnnnnnnnnnnnnnnnnnnnnnnnnnnnnnnnnnnnnnnnnnnnnnnnnnnnnnnnnnnnnnnnnnnnnnnnnnnnnnnnnnnnnnnnnnnnnnnnnnnnnnnnnnnnnnnnnnnnnnnnnnnnnnnnnnnnnnnnnnnnnnnnnnnnnnnnnnnnnnnnnnnnnnnnnnnnnnnnnnnnnnnnnnnnnnnnnnnnnnnnnnnnnnnnnnnnnnnnnnnnnnnnnnnnnnnnnnnnnnnnnnnnnnnnnnnnnnnnnnnnnnnnnnnnnnnnnnnnnnnnnnnnnnnnnnnnnnnnnnnnnnnnnnnnnnnnnnnnnnnnnnnnnnnnnnnnnnnnnnnnnnnnnnnnnnnnnnnnnnnnnnnnnnnnnnnnnnnnnnnnnnnnnnnnnnnnnnnnnnnnnnnnnnnnnnnnnnnnnnnnnnnnnnnnnnnnnnnnnnnnnnnnnnnnnnnnnnnnnnnnnnnnnnnnnnnnnnnnnnnnnnnnnnnnnnnnnnnnnnnnnnnnnnnnnnnnnnnnnnnnnnnnnnnnnnnnnnnnnnnnnnnnnnnnnnnnnnnnnnnnnnnnnnnnnnnnnnnnnnnnnnnnnnnnnnnnnnnnnnnnnnnnnnnnnnnnnnnnnnnnnnnnnnnnnnnnnnnnnnnnnnnnnnnnnnnnnnnnnnnnnnnnnnnnnnnnnnnnnnnnnnnnnnnnnnnnnnnnnnnnnnnnnnnnnnnnnnnnnnnnnnnnnnnnnnnnnnnnnnnnnnnnnnnnnnnnnnnnnnnnnnnnnnnnnnnnnnnnnnnnnnnnnnnnnnnnnnnnnnnnnnnnnnnnnnnnnnnnnnnnnnnnnnnnnnnnnnnnnnnnnnnnnnnnnnnnnnnnnnnnnnnnnnnnnnnnnnnnnnnnnnnnnnnnnnnnnnnnnnnnnnnnnnnnnnnnnnnnnnnnnnnnnnnnnnnnnnnnnnnnnnnnnnnnnnnnnnnnnnnnnnnnnnnnnnnnnnnnnnnnnnnnnnnnnnnnnnnnnnnnnnnnnnnnnnnnnnnnnnnnnnnnnnnnnnnnnnnnnnnnnnnnnnnnnnnnnnnnnnnnnnnnnnnnnnnnnnnnnnnnnnnnnnnnnnnnnnnnnnnnnnnnnnnnnnnnnnnnnnnnnnnnnnnnnnnnnnnnnnnnnnnnnnnnnnnnnnnnnnnnnnnnnnnnnnnnnnnnnnnnnnnnnnnnnnnnnnnnnnnnnnnnnnnnnnnnnnnnnnnnnnnnnnnnnnnnnnnnnnnnnnnnnnnnnnnnnnnnnnnnnnnnnnnnnnnnnnnnnnnnnnnnnnnnnnnnnnnnnnnnnnnnnnnnnnnnnnnnnnnnnnnnnnnnnnnnnnnnnnnnnnnnnnnnnnnnnnnnnnnnnnnnnnnnnnnnnnnnnnnnnnnnnnnnnnnnnnnnnnnnnnnnnnnnnnnnnnnnnnnnnnnnnnnnnnnnnnnnnnnnnnnnnnnnnnnnnnnnnnnnnnnnnnnnnnnnnnnnnnnnnnnnnnnnnnnnnnnnnnnnnnnnnnnnnnnnnnnnnnnnnnnnnnnnnnnnnnnnnnnnnnnnnnnnnnnnnnnnnnnnnnnnnnnnnnnnnnnnnnnnnnnnnnnnnnnnnnnnnnnnnnnnnnnnnnnnnnnnnnnnnnnnnnnnnnnnnnnnnnnnnnnnnnnnnnnnnnnnnnnnnnnnnnnnnnnnnnnnnnnnnnnnnnnnnnnnnnnnnnnnnnnnnnnnnnnnnnnnnnnnnnnnnnnnnnnnnnnnnnnnnnnnnnnnnnnnnnnnnnnnnnnnnnnnnnnnnnnnnnnnnnnnnnnnnnnnnnnnnnnnnnnnnnnnnnnnnnnnnnnnnnnnnnnnnnnnnnnnnnnnnnnnnnnnnnnnnnnnnnnnnnnnnnnnnnnnnnnnnnnnnnnnnnnnnnnnnnnnnnnnnnnnnnnnnnnnnnnnnnnnnnnnnnnnnnnnnnnnnnnnnnnnnnnnnnnnnnnnnnnnnnnnnnnnnnnnnnnnnnnnnnnnnnnnnnnnnnnnnnnnnnnnnnnnnnnnnnnnnnnnnnnnnnnnnnnnnnnnnnnnnnnnnnnnnnnnnnnnnnnnnnnnnnnnnnnnnnnnnnnnnnnnnnnnnnnnnnnnnnnnnnnnnnnnnnnnnnnnnnnnnnnnnnnnnnnnnnnnnnnnnnnnnnnnnnnnnnnnnnnnnnnnnnnnnnnnnnnnnnnnnnnnnnnnnnnnnnnnnnnnnnnnnnnnnnnnnnnnnnnnnnnnnnnnnnnnnnnnnnnnnnnnnnnnnnnnnnnnnnnnnnnnnnnnnnnnnnnnnnnnnnnnnnnnnnnnnnnnnnnnnnnnnnnnnnnnnnnnnnnnnnnnnnnnnnnnnnnnnnnnnnnnnnnnnnnnnnnnnnnnnnnnnnnnnnnnnnnnnnnnnnnnnnnnnnnnnnnnnnnnnnnnnnnnnnnnnnnnnnnnnnnnnnnnnnnnnnnnnnnnnnnnnnnnnnnnnnnnnnnnnnnnnnnnnnnnnnnnnnnnnnnnnnnnnnnnnnnnnnnnnnnnnnnnnnnnnnnnnnnnnnnnnnnnnnnnnnnnnnnnnnnnnnnnnnnnnnnnnnnnnnnnnnnnnnnnnnnnnnnnnnnnnnnnnnnnnnnnnnnnnnnnnnnnnnnnnnnnnnnnnnnnnnnnnnnnnnnnnnnnnnnnnnnnnnnnnnnnnnnnnnnnnnnnnnnnnnnnnnnnnnnnnnnnnnnnnnnnnnnnnnnnnnnnnnnnnnnnnnnnnnnnnnnnnnnnnnnnnnnnnnnnnnnnnnnnnnnnnnnnnnnnnnnnnnnnnnnnnnnnnnnnnnnnnnnnnnnnnnnnnnnnnnnnnnnnnnnnnnnnnnnnnnnnnnnnnnnnnnnnnnnnnnnnnnnnnnnnnnnnnnnnnnnnnnnnnnnnnnnnnnnnnnnnnnnnnnnnnnnnnnnnnnnnnnnnnnnnnnnnnnnnnnnnnnnnnnnnnnnnnnnnnnnnnnnnnnnnnnnnnnnnnnnnnnnnnnnnnnnnnnnnnnnnnnnnnnnnnnnnnnnnnnnnnnnnnnnnnnnnnnnnnnnnnnnnnnnnnnnnnnnnnnnnnnnnnnnnnnnnnnnnnnnnnnnnnnnnnnnnnnnnnnnnnnnnnnnnnnnnnnnnnnnnnnnnnnnnnnnnnnnnnnnnnnnnnnnnnnnnnnnnnnnnnnnnnnnnnnnnnnnnnnnnnnnnnnnnnnnnnnnnnnnnnnnnnnnnnnnnnnnnnnnnnnnnnnnnnnnnnnnnnnnnnnnnnnnnnnnnnnnnnnnnnnnnnnnnnnnnnnnnnnnnnnnnnnnnnnnnnnnnnnnnnnnnnnnnnnnnnnnnnnnnnnnnnnnnnnnnnnnnnnnnnnnnnnnnnnnnnnnnnnnnnnnnnnnnnnnnnnnnnnnnnnnnnnnnnnnnnnnnnnnnnnnnnnnnnnnnnnnnnnnnnnnnnnnnnnnnnnnnnnnnnnnnnnnnnnnnnnnnnnnnnnnnnnnnnnnnnnnnnnnnnnnnnnnnnnnnnnnnnnnnnnnnnnnnnnnnnnnnnnnnnnnnnnnnnnnnnnnnnnnnnnnnnnnnnnnnnnnnnnnnnnnnnnnnnnnnnnnnnnnnnnnnnnnnnnnnnnnnnnnnnnnnnnnnnnnnnnnnnnnnnnnnnnnnnnnnnnnnnnnnnnnnnnnnnnnnnnnnnnnnnnnnnnnnnnnnnnnnnnnnnnnnnnnnnnnnnnnnnnnnnnnnnnnnnnnnnnnnnnnnnnnnnnnnnnnnnnnnnnnnnnnnnnnnnnnnnnnnnnnnnnnnnnnnnnnnnnnnnnnnnnnnnnnnnnnnnnnnnnnnnnnnnnnnnnnnnnnnnnnnnnnnnnnnnnnnnnnnnnnnnnnnnnnnnnnnnnnnnnnnnnnnnnnnnnnnnnnnnnnnnnnnnnnnnnnnnnnnnnnnnnnnnnnnnnnnnnnnnnnnnnnnnnnnnnnnnnnnnnnnnnnnnnnnnnnnnnnnnnnnnnnnnnnnnnnnnnnnnnnnnnnnnnnnnnnnnnnnnnnnnnnnnnnnnnnnnnnnnnnnnnnnnnnnnnnnnnnnnnnnnnnnnnnnnnnnnnnnnnnnnnnnnnnnnnnnnnnnnnnnnnnnnnnnnnnnnnnnnnnnnnnnnnnnnnnnnnnnnnnnnnnnnnnnnnnnnnnnnnnnnnnnnnnnnnnnnnnnnnnnnnnnnnnnnnnnnnnnnnnnnnnnnnnnnnnnnnnnnnnnnnnnnnnnnnnnnnnnnnnnnnnnnnnnnnnnnnnnnnnnnnnnnnnnnnnnnnnnnnnnnnnnnnnnnnnnnnnnnnnnnnnnnnnnnnnnnnnnnnnnnnnnnnnnnnnnnnnnnnnnnnnnnnnnnnnnnnnnnnnnnnnnnnnnnnnnnnnnnnnnnnnnnnnnnnnnnnnnnnnnnnnnnnnnnnnnnnnnnnnnnnnnnnnnnnnnnnnnnnnnnnnnnnnnnnnnnnnnnnnnnnnnnnnnnnnnnnnnnnnnnnnnnnnnnnnnnnnnnnnnnnnnnnnnnnnnnnnnnnnnnnnnnnnnnnnnnnnnnnnnnnnnnnnnnnnnnnnnnnnnnnnnnnnnnnnnnnnnnnnnnnnnnnnnnnnnnnnnnnnnnnnnnnnnnnnnnnnnnnnnnnnnnnnnnnnnnnnnnnnnnnnnnnnnnnnnnnnnnnnnnnnnnnnnnnnnnnnnnnnnnnnnnnnnnnnnnnnnnnnnnnnnnnnnnnnnnnnnnnnnnnnnnnnnnnnnnnnnnnnnnnnnnnnnnnnnnnnnnnnnnnnnnnnnnnnnnnnnnnnnnnnnnnnnnnnnnnnnnnnnnnnnnnnnnnnnnnnnnnnnnnnnnnnnnnnnnnnnnnnnnnnnnnnnnnnnnnnnnnnnnnnnnnnnnnnnnnnnnnnnnnnnnnnnnnnnnnnnnnnnnnnnnnnnnnnnnnnnnnnnnnnnnnnnnnnnnnnnnnnnnnnnnnnnnnnnnnnnnnnnnnnnnnnnnnnnnnnnnnnnnnnnnnnnnnnnnnnnnnnnnnnnnnnnnnnnnnnnnnnnnnnnnnnnnnnnnnnnnnnnnnnnnnnnnnnnnnnnnnnnnnnnnnnnnnnnnnnnnnnnnnnnnnnnnnnnnnnnnnnnnnnnnnnnnnnnnnnnnnnnnnnnnnnnnnnnnnnnnnnnnnnnnnnnnnnnnnnnnnnnnnnnnnnnnnnnnnnnnnnnnnnnnnnnnnnnnnnnnnnnnnnnnnnnnnnnnnnnnnnnnnnnnnnnnnnnnnnnnnnnnnnnnnnnnnnnnnnnnnnnnnnnnnnnnnnnnnnnnnnnnnnnnnnnnnnnnnnnnnnnnnnnnnnnnnnnnnnnnnnnnnnnnnnnnnnnnnnnnnnnnnnnnnnnnnnnnnnnnnnnnnnnnnnnnnnnnnnnnnnnnnnnnnnnnnnnnnnnnnnnnnnnnnnnnnnnnnnnnnnnnnnnnnnnnnnnnnnnnnnnnnnnnnnnnnnnnnnnnnnnnnnnnnnnnnnnnnnnnnnnnnnnnnnnnnnnnnnnnnnnnnnnnnnnnnnnnnnnnnnnnnnnnnnnnnnnnnnnnnnnnnnnnnnnnnnnnnnnnnnnnnnnnnnnnnnnnnnnnnnnnnnnnnnnnnnnnnnnnnnnnnnnnnnnnnnnnnnnnnnnnnnnnnnnnnnnnnnnnnnnnnnnnnnnnnnnnnnnnnnnnnnnnnnnnnnnnnnnnnnnnnnnnnnnnnnnnnnnnnnnnnnnnnnnnnnnnnnnnnnnnnnnnnnnnnnnnnnnnnnnnnnnnnnnnnnnnnnnnnnnnnnnnnnnnnnnnnnnnnnnnnnnnnnnnnnnnnnnnnnnnnnnnnnnnnnnnnnnnnnnnnnnnnnnnnnnnnnnnnnnnnnnnnnnnnnnnnnnnnnnnnnnnnnnnnnnnnnnnnnnnnnnnnnnnnnnnnnnnnnnnnnnnnnnnnnnnnnnnnnnnnnnnnnnnnnnnnnnnnnnnnnnnnnnnnnnnnnnnnnnnnnnnnnnnnnnnnnnnnnnnnnnnnnnnnnnnnnnnnnnnnnnnnnnnnnnnnnnnnnnnnnnnnnnnnnnnnnnnnnnnnnnnnnnnnnnnnnnnnnnnnnnnnnnnnnnnnnnnnnnnnnnnnnnnnnnnnnnnnnnnnnnnnnnnnnnnnnnnnnnnnnnnnnnnnnnnnnnnnnnnnnnnnnnnnnnnnnnnnnnnnnnnnnnnnnnnnnnnnnnnnnnnnnnnnnnnnnnnnnnnnnnnnnnnnnnnnnnnnnnnnnnnnnnnnnnnnnnnnnnnnnnnnnnnnnnnnnnnnnnnnnnnnnnnnnnnnnnnnnnnnnnnnnnnnnnnnnnnnnnnnnnnnnnnnnnnnnnnnnnnnnnnnnnnnnnnnnnnnnnnnnnnnnnnnnnnnnnnnnnnnnnnnnnnnnnnnnnnnnnnnnnnnnnnnnnnnnnnnnnnnnnnnnnnnnnnnnnnnnnnnnnnnnnnnnnnnnnnnnnnnnnnnnnnnnnnnnnnnnnnnnnnnnnnnnnnnnnnnnnnnnnnnnnnnnnnnnnnnnnnnnnnnnnnnnnnnnnnnnnnnnnnnnnnnnnnnnnnnnnnnnnnnnnnnnnnnnnnnnnnnnnnnnnnnnnnnnnnnnnnnnnnnnnnnnnnnnnnnnnnnnnnnnnnnnnnnnnnnnnnnnnnnnnnnnnnnnnnnnnnnnnnnnnnnnnnnnnnnnnnnnnnnnnnnnnnnnnnnnnnnnnnnnnnnnnnnnnnnnnnnnnnnnnnnnnnnnnnnnnnnnnnnnnnnnnnnnnnnnnnnnnnnnnnnnnnnnnnnnnnnnnnnnnnnnnnnnnnnnnnnnnnnnnnnnnnnnnnnnnnnnnnnnnnnnnnnnnnnnnnnnnnnnnnnnnnnnnnnnnnnnnnnnnnnnnnnnnnnnnnnnnnnnnnnnnnnnnnnnnnnnnnnnnnnnnnnnnnnnnnnnnnnnnnnnnnnnnnnnnnnnnnnnnnnnnnnnnnnnnnnnnnnnnnnnnnnnnnnnnnnnnnnnnnnnnnnnnnnnnnnnnnnnnnnnnnnnnnnnnnnnnnnnnnnnnnnnnnnnnnnnnnnnnnnnnnnnnnnnnnnnnnnnnnnnnnnnnnnnnnnnnnnnnnnnnnnnnnnnnnnnnnnnnnnnnnnnnnnnnnnnnnnnnnnnnnnnnnnnnnnnnnnnnnnnnnnnnnnnnnnnnnnnnnnnnnnnnnnnnnnnnnnnnnnnnnnnnnnnnnnnnnnnnnnnnnnnnnnnnnnnnnnnnnnnnnnnnnnnnnnnnnnnnnnnnnnnnnnnnnnnnnnnnnnnnnnnnnnnnnnnnnnnnnnnnnnnnnnnnnnnnnnnnnnnnnnnnnnnnnnnnnnnnnnnnnnnnnnnnnnnnnnnnnnnnnnnnnnnnnnnnnnnnnnnnnnnnnnnnnnnnnnnnnnnnnnnnnnnnnnnnnnnnnnnnnnnnnnnnnnnnnnnnnnnnnnnnnnnnnnnnnnnnnnnnnnnnnnnnnnnnnnnnnnnnnnnnnnnnnnnnnnnnnnnnnnnnnnnnnnnnnnnnnnnnnnnnnnnnnnnnnnnnnnnnnnnnnnnnnnnnnnnnnnnnnnnnnnnnnnnnnnnnnnnnnnnnnnnnnnnnnnnnnnnnnnnnnnnnnnnnnnnnnnnnnnnnnnnnnnnnnnnnnnnnnnnnnnnnnnnnnnnnnnnnnnnnnnnnnnnnnnnnnnnnnnnnnnnnnnnnnnnnnnnnnnnnnnnnnnnnnnnnnnnnnnnnnnnnnnnnnnnnnnnnnnnnnnnnnnnnnnnnnnnnnnnnnnnnnnnnnnnnnnnnnnnnnnnnnnnnnnnnnnnnnnnnnnnnnnnnnnnnnnnnnnnnnnnnnnnnnnnnnnnnnnnnnnnnnnnnnnnnnnnnnnnnnnnnnnnnnnnnnnnnnnnnnnnnnnnnnnnnnnnnnnnnnnnnnnnnnnnnnnnnnnnnnnnnnnnnnnnnnnnnnnnnnnnnnnnnnnnnnnnnnnnnnnnnnnnnnnnnnnnnnnnnnnnnnnnnnnnnnnnnnnnnnnnnnnnnnnnnnnnnnnnnnnnnnnnnnnnnnnnnnnnnnnnnnnnnnnnnnnnnnnnnnnnnnnnnnnnnnnnnnnnnnnnnnnnnnnnnnnnnnnnnnnnnnnnnnnnnnnnnnnnnnnnnnnnnnnnnnnnnnnnnnnnnnnnnnnnnnnnnnnnnnnnnnnnnnnnnnnnnnnnnnnnnnnnnnnnnnnnnnnnnnnnnnnnnnnnnnnnnnnnnnnnnnnnnnnnnnnnnnnnnnnnnnnnnnnnnnnnnnnnnnnnnnnnnnnnnnnnnnnnnnnnnnnnnnnnnnnnnnnnnnnnnnnnnnnnnnnnnnnnnnnnnnnnnnnnnnnnnnnnnnnnnnnnnnnnnnnnnnnnnnnnnnnnnnnnnnnnnnnnnnnnnnnnnnnnnnnnnnnnnnnnnnnnnnnnnnnnnnnnnnnnnnnnnnnnnnnnnnnnnnnnnnnnnnnnnnnnnnnnnnnnnnnnnnnnnnnnnnnnnnnnnnnnnnnnnnnnnnnnnnnnnnnnnnnnnnnnnnnnnnnnnnnnnnnnnnnnnnnnnnnnnnnnnnnnnnnnnnnnnnnnnnnnnnnnnnnnnnnnnnnnnnnnnnnnnnnnnnnnnnnnnnnnnnnnnnnnnnnnnnnnnnnnnnnnnnnnnnnnnnnnnnnnnnnnnnnnnnnnnnnnnnnnnnnnnnnnnnnnnnnnnnnnnnnnnnnnnnnnnnnnnnnnnnnnnnnnnnnnnnnnnnnnnnnnnnnnnnnnnnnnnnnnnnnnnnnnnnnnnnnnnnnnnnnnnnnnnnnnnnnnnnnnnnnnnnnnnnnnnnnnnnnnnnnnnnnnnnnnnnnnnnnnnnnnnnnnnnnnnnnnnnnnnnnnnnnnnnnnnnnnnnnnnnnnnnnnnnnnnnnnnnnnnnnnnnnnnnnnnnnnnnnnnnnnnnnnnnnnnnnnnnnnnnnnnnnnnnnnnnnnnnnnnnnnnnnnnnnnnnnnnnnnnnnnnnnnnnnnnnnnnnnnnnnnnnnnnnnnnnnnnnnnnnnnnnnnnnnnnnnnnnnnnnnnnnnnnnnnnnnnnnnnnnnnnnnnnnnnnnnnnnnnnnnnnnnnnnnnnnnnnnnnnnnnnnnnnnnnnnnnnnnnnnnnnnnnnnnnnnnnnnnnnnnnnnnnnnnnnnnnnnnnnnnnnnnnnnnnnnnnnnnnnnnnnnnnnnnnnnnnnnnnnnnnnnnnnnnnnnnnnnnnnnnnnnnnnnnnnnnnnnnnnnnnnnnnnnnnnnnnnnnnnnnnnnnnnnnnnnnnnnnnnnnnnnnnnnnnnnnnnnnnnnnnnnnnnnnnnnnnnnnnnnnnnnnnnnnnnnnnnnnnnnnnnnnnnnnnnnnnnnnnnnnnnnnnnnnnnnnnnnnnnnnnnnnnnnnnnnnnnnnnnnnnnnnnnnnnnnnnnnnnnnnnnnnnnnnnnnnnnnnnnnnnnnnnnnnnnnnnnnnnnnnnnnnnnnnnnnnnnnnnnnnnnnnnnnnnnnnnnnnnnnnnnnnnnnnnnnnnnnnnnnnnnnnnnnnnnnnnnnnnnnnnnnnnnnnnnnnnnnnnnnnnnnnnnnnnnnnnnnnnnnnnnnnnnnnnnnnnnnnnnnnnnnnnnnnnnnnnnnnnnnnnnnnnnnnnnnnnnnnnnnnnnnnnnnnnnnnnnnnnnnnnnnnnnnnnnnnnnnnnnnnnnnnnnnnnnnnnnnnnnnnnnnnnnnnnnnnnnnnnnnnnnnnnnnnnnnnnnnnnnnnnnnnnnnnnnnnnnnnnnnnnnnnnnnnnnnnnnnnnnnnnnnnnnnnnnnnnnnnnnnnnnnnnnnnnnnnnnnnnnnnnnnnnnnnnnnnnnnnnnnnnnnnnnnnnnnnnnnnnnnnnnnnnnnnnnnnnnnnnnnnnnnnnnnnnnnnnnnnnnnnnnnnnnnnnnnnnnnnnnnnnnnnnnnnnnnnnnnnnnnnnnnnnnnnnnnnnnnnnnnnnnnnnnnnnnnnnnnnnnnnnnnnnnnnnnnnnnnnnnnnnnnnnnnnnnnnnnnnnnnnnnnnnnnnnnnnnnnnnnnnnnnnnnnnnnnnnnnnnnnnnnnnnnnnnnnnnnnnnnnnnnnnnnnnnnnnnnnnnnnnnnnnnnnnnnnnnnnnnnnnnnnnnnnnnnnnnnnnnnnnnnnnnnnnnnnnnnnnnnnnnnnnnnnnnnnnnnnnnnnnnnnnnnnnnnnnnnnnnnnnnnnnnnnnnnnnnnnnnnnnnnnnnnnnnnnnnnnnnnnnnnnnnnnnnnnnnnnnnnnnnnnnnnnnnnnnnnnnnnnnnnnnnnnnnnnnnnnnnnnnnnnnnnnnnnnnnnnnnnnnnnnnnnnnnnnnnnnnnnnnnnnnnnnnnnnnnnnnnnnnnnnnnnnnnnnnnnnnnnnnnnnnnnnnnnnnnnnnnnnnnnnnnnnnnnnnnnnnnnnnnnnnnnnnnnnnnnnnnnnnnnnnnnnnnnnnnnnnnnnnnnnnnnnnnnnnnnnnnnnnnnnnnnnnnnnnnnnnnnnnnnnnnnnnnnnnnnnnnnnnnnnnnnnnnnnnnnnnnnnnnnnnnnnnnnnnnnnnnnnnnnnnnnnnnnnnnnnnnnnnnnnnnnnnnnnnnnnnnnnnnnnnnnnnnnnnnnnnnnnnnnnnnnnnnnnnnnnnnnnnnnnnnnnnnnnnnnnnnnnnnnnnnnnnnnnnnnnnnnnnnnnnnnnnnnnnnnnnnnnnnnnnnnnnnnnnnnnnnnnnnnnnnnnnnnnnnnnnnnnnnnnnnnnnnnnnnnnnnnnnnnnnnnnnnnnnnnnnnnnnnnnnnnnnnnnnnnnnnnnnnnnnnnnnnnnnnnnnnnnnnnnnnnnnnnnnnnnnnnnnnnnnnnnnnnnnnnnnnnnnnnnnnnnnnnnnnnnnnnnnnnnnnnnnnnnnnnnnnnnnnnnnnnnnnnnnnnnnnnnnnnnnnnnnnnnnnnnnnnnnnnnnnnnnnnnnnnnnnnnnnnnnnnnnnnnnnnnnnnnnnnnnnnnnnnnnnnnnnnnnnnnnnnnnnnnnnnnnnnnnnnnnnnnnnnnnnnnnnnnnnnnnnnnnnnnnnnnnnnnnnnnnnnnnnnnnnnnnnnnnnnnnnnnnnnnnnnnnnnnnnnnnnnnnnnnnnnnnnnnnnnnnnnnnnnnnnnnnnnnnnnnnnnnnnnnnnnnnnnnnnnnnnnnnnnnnnnnnnnnnnnnnnnnnnnnnnnnnnnnnnnnnnnnnnnnnnnnnnnnnnnnnnnnnnnnnnnnnnnnnnnnnnnnnnnnnnnnnnnnnnnnnnnnnnnnnnnnnnnnnnnnnnnnnnnnnnnnnnnnnnnnnnnnnnnnnnnnnnnnnnnnnnnnnnnnnnnnnnnnnnnnnnnnnnnnnnnnnnnnnnnnnnnnnnnnnnnnnnnnnnnnnnnnnnnnnnnnnnnnnnnnnnnnnnnnnnnnnnnnnnnnnnnnnnnnnnnnnnnnnnnnnnnnnnnnnnnnnnnnnnnnnnnnnnnnnnnnnnnnnnnnnnnnnnnnnnnnnnnnnnnnnnnnnnnnnnnnnnnnnnnnnnnnnnnnnnnnnnnnnnnnnnnnnnnnnnnnnnnnnnnnnnnnnnnnnnnnnnnnnnnnnnnnnnnnnnnnnnnnnnnnnnnnnnnnnnnnnnnnnnnnnnnnnnnnnnnnnnnnnnnnnnnnnnnnnnnnnnnnnnnnnnnnnnnnnnnnnnnnnnnnnnnnnnnnnnnnnnnnnnnnnnnnnnnnnnnnnnnnnnnnnnnnnnnnnnnnnnnnnnnnnnnnnnnnnnnnnnnnnnnnnnnnnnnnnnnnnnnnnnnnnnnnnnnnnnnnnnnnnnnnnnnnnnnnnnnnnnnnnnnnnnnnnnnnnnnnnnnnnnnnnnnnnnnnnnnnnnnnnnnnnnnnnnnnnnnnnnnnnnnnnnnnnnnnnnnnnnnnnnnnnnnnnnnnnnnnnnnnnnnnnnnnnnnnnnnnnnnnnnnnnnnnnnnnnnnnnnnnnnnnnnnnnnnnnnnnnnnnnnnnnnnnnnnnnnnnnnnnnnnnnnnnnnnnnnnnnnnnnnnnnnnnnnnnnnnnnnnnnnnnnnnnnnnnnnnnnnnnnnnnnnnnnnnnnnnnnnnnnnnnnnnnnnnnnnnnnnnnnnnnnnnnnnnnnnnnnnnnnnnnnnnnnnnnnnnnnnnnnnnnnnnnnnnnnnnnnnnnnnnnnnnnnnnnnnnnnnnnnnnnnnnnnnnnnnnnnnnnnnnnnnnnnnnnnnnnnnnnnnnnnnnnnnnnnnnnnnnnnnnnnnnnnnnnnnnnnnnnnnnnnnnnnnnnnnnnnnnnnnnnnnnnnnnnnnnnnnnnnnnnnnnnnnnnnnnnnnnnnnnnnnnnnnnnnnnnnnnnnnnnnnnnnnnnnnnnnnnnnnnnnnnnnnnnnnnnnnnnnnnnnnnnnnnnnnnnnnnnnnnnnnnnnnnnnnnnnnnnnnnnnnnnnnnnnnnnnnnnnnnnnnnnnnnnnnnnnnnnnnnnnnnnnnnnnnnnnnnnnnnnnnnnnnnnnnnnnnnnnnnnnnnnnnnnnnnnnnnnnnnnnnnnnnnnnnnnnnnnnnnnnnnnnnnnnnnnnnnnnnnnnnnnnnnnnnnnnnnnnnnnnnnnnnnnnnnnnnnnnnnnnnnnnnnnnnnnnnnnnnnnnnnnnnnnnnnnnnnnnnnnnnnnnnnnnnnnnnnnnnnnnnnnnnnnnnnnnnnnnnnnnnnnnnnnnnnnnnnnnnnnnnnnnnnnnnnnnnnnnnnnnnnnnnnnnnnnnnnnnnnnnnnnnnnnnnnnnnnnnnnnnnnnnnnnnnnnnnnnnnnnnnnnnnnnnnnnnnnnnnnnnnnnnnnnnnnnnnnnnnnnnnnnnnnnnnnnnnnnnnnnnnnnnnnnnnnnnnnnnnnnnnnnnnnnnnnnnnnnnnnnnnnnnnnnnnnnnnnnnnnnnnnnnnnnnnnnnnnnnnnnnnnnnnnnnnnnnnnnnnnnnnnnnnnnnnnnnnnnnnnnnnnnnnnnnnnnnnnnnnnnnnnnnnnnnnnnnnnnnnnnnnnnnnnnnnnnnnnnnnnnnnnnnnnnnnnnnnnnnnnnnnnnnnnnnnnnnnnnnnnnnnnnnnnnnnnnnnnnnnnnnnnnnnnnnnnnnnnnnnnnnnnnnnnnnnnnnnnnnnnnnnnnnnnnnnnnnnnnnnnnnnnnnnnnnnnnnnnnnnnnnnnnnnnnnnnnnnnnnnnnnnnnnnnnnnnnnnnnnnnnnnnnnnnnnnnnnnnnnnnnnnnnnnnnnnnnnnnnnnnnnnnnnnnnnnnnnnnnnnnnnnnnnnnnnnnnnnnnnnnnnnnnnnnnnnnnnnnnnnnnnnnnnnnnnnnnnnnnnnnnnnnnnnnnnnnnnnnnnnnnnnnnnnnnnnnnnnnnnnnnnnnnnnnnnnnnnnnnnnnnnnnnnnnnnnnnnnnnnnnnnnnnnnnnnnnnnnnnnnnnnnnnnnnnnnnnnnnnnnnnnnnnnnnnnnnnnnnnnnnnnnnnnnnnnnnnnnnnnnnnnnnnnnnnnnnnnnnnnnnnnnnnnnnnnnnnnnnnnnnnnnnnnnnnnnnnnnnnnnnnnnnnnnnnnnnnnnnnnnnnnnnnnnnnnnnnnnnnnnnnnnnnnnnnnnnnnnnnnnnnnnnnnnnnnnnnnnnnnnnnnnnnnnnnnnnnnnnnnnnnnnnnnnnnnnnnnnnnnnnnnnnnnnnnnnnnnnnnnnnnnnnnnnnnnnnnnnnnnnnnnnnnnnnnnnnnnnnnnnnnnnnnnnnnnnnnnnnnnnnnnnnnnnnnnnnnnnnnnnnnnnnnnnnnnnnnnnnnnnnnnnnnnnnnnnnnnnnnnnnnnnnnnnnnnnnnnnnnnnnnnnnnnnnnnnnnnnnnnnnnnnnnnnnnnnnnnnnnnnnnnnnnnnnnnnnnnnnnnnnnnnnnnnnnnnnnnnnnnnnnnnnnnnnnnnnnnnnnnnnnnnnnnnnnnnnnnnnnnnnnnnnnnnnnnnnnnnnnnnnnnnnnnnnnnnnnnnnnnnnnnnnnnnnnnnnnnnnnnnnnnnnnnnnnnnnnnnnnnnnnnnnnnnnnnnnnnnnnnnnnnnnnnnnnnnnnnnnnnnnnnnnnnnnnnnnnnnnnnnnnnnnnnnnnnnnnnnnnnnnnnnnnnnnnnnnnnnnnnnnnnnnnnnnnnnnnnnnnnnnnnnnnnnnnnnnnnnnnnnnnnnnnnnnnnnnnnnnnnnnnnnnnnnnnnnnnnnnnnnnnnnnnnnnnnnnnnnnnnnnnnnnnnnnnnnnnnnnnnnnnnnnnnnnnnnnnnnnnnnnnnnnnnnnnnnnnnnnnnnnnnnnnnnnnnnnnnnnnnnnnnnnnnnnnnnnnnnnnnnnnnnnnnnnnnnnnnnnnnnnnnnnnnnnnnnnnnnnnnnnnnnnnnnnnnnnnnnnnnnnnnnnnnnnnnnnnnnnnnnnnnnnnnnnnnnnnnnnnnnnnnnnnnnnnnnnnnnnnnnnnnnnnnnnnnnnnnnnnnnnnnnnnnnnnnnnnnnnnnnnnnnnnnnnnnnnnnnnnnnnnnnnnnnnnnnnnnnnnnnnnnnnnnnnnnnnnnnnnnnnnnnnnnnnnnnnnnnnnnnnnnnnnnnnnnnnnnnnnnnnnnnnnnnnnnnnnnnnnnnnnnnnnnnnnnnnnnnnnnnnnnnnnnnnnnnnnnnnnnnnnnnnnnnnnnnnnnnnnnnnnnnnnnnnnnnnnnnnnnnnnnnnnnnnnnnnnnnnnnnnnnnnnnnnnnnnnnnnnnnnnnnnnnnnnnnnnnnnnnnnnnnnnnnnnnnnnnnnnnnnnnnnnnnnnnnnnnnnnnnnnnnnnnnnnnnnnnnnnnnnnnnnnnnnnnnnnnnnnnnnnnnnnnnnnnnnnnnnnnnnnnnnnnnnnnnnnnnnnnnnnnnnnnnnnnnnnnnnnnnnnnnnnnnnnnnnnnnnnnnnnnnnnnnnnnnnnnnnnnnnnnnnnnnnnnnnnnnnnnnnnnnnnnnnnnnnnnnnnnnnnnnnnnnnnnnnnnnnnnnnnnnnnnnnnnnnnnnnnnnnnnnnnnnnnnnnnnnnnnnnnnnnnnnnnnnnnnnnnnnnnnnnnnnnnnnnnnnnnnnnnnnnnnnnnnnnnnnnnnnnnnnnnnnnnnnnnnnnnnnnnnnnnnnnnnnnnnnnnnnnnnnnnnnnnnnnnnnnnnnnnnnnnnnnnnnnnnnnnnnnnnnnnnnnnnnnnnnnnnnnnnnnnnnnnnnnnnnnnnnnnnnnnnnnnnnnnnnnnnnnnnnnnnnnnnnnnnnnnnnnnnnnnnnnnnnnnnnnnnnnnnnnnnnnnnnnnnnnnnnnnnnnnnnnnnnnnnnnnnnnnnnnnnnnnnnnnnnnnnnnnnnnnnnnnnnnnnnnnnnnnnnnnnnnnnnnnnnnnnnnnnnnnnnnnnnnnnnnnnnnnnnnnnnnnnnnnnnnnnnnnnnnnnnnnnnnnnnnnnnnnnnnnnnnnnnnnnnnnnnnnnnnnnnnnnnnnnnnnnnnnnnnnnnnnnnnnnnnnnnnnnnnnnnnnnnnnnnnnnnnnnnnnnnnnnnnnnnnnnnnnnnnnnnnnnnnnnnnnnnnnnnnnnnnnnnnnnnnnnnnnnnnnnnnnnnnnnnnnnnnnnnnnnnnnnnnnnnnnnnnnnnnnnnnnnnnnnnnnnnnnnnnnnnnnnnnnnnnnnnnnnnnnnnnnnnnnnnnnnnnnnnnnnnnnnnnnnnnnnnnnnnnnnnnnnnnnnnnnnnnnnnnnnnnnnnnnnnnnnnnnnnnnnnnnnnnnnnnnnnnnnnnnnnnnnnnnnnnnnnnnnnnnnnnnnnnnnnnnnnnnnnnnnnnnnnnnnnnnnnnnnnnnnnnnnnnnnnnnnnnnnnnnnnnnnnnnnnnnnnnnnnnnnnnnnnnnnnnnnnnnnnnnnnnnnnnnnnnnnnnnnnnnnnnnnnnnnnnnnnnnnnnnnnnnnnnnnnnnnnnnnnnnnnnnnnnnnnnnnnnnnnnnnnnnnnnnnnnnnnnnnnnnnnnnnnnnnnnnnnnnnnnnnnnnnnnnnnnnnnnnnnnnnnnnnnnnnnnnnnnnnnnnnnnnnnnnnnnnnnnnnnnnnnnnnnnnnnnnnnnnnnnnnnnnnnnnnnnnnnnnnnnnnnnnnnnnnnnnnnnnnnnnnnnnnnnnnnnnnnnnnnnnnnnnnnnnnnnnnnnnnnnnnnnnnnnnnnnnnnnnnnnnnnnnnnnnnnnnnnnnnnnnnnnnnnnnnnnnnnnnnnnnnnnnnnnnnnnnnnnnnnnnnnnnnnnnnnnnnnnnnnnnnnnnnnnnnnnnnnnnnnnnnnnnnnnnnnnnnnnnnnnnnnnnnnnnnnnnnnnnnnnnnnnnnnnnnnnnnnnnnnnnnnnnnnnnnnnnnnnnnnnnnnnnnnnnnnnnnnnnnnnnnnnnnnnnnnnnnnnnnnnnnnnnnnnnnnnnnnnnnnnnnnnnnnnnnnnnnnnnnnnnnnnnnnnnnnnnnnnnnnnnnnnnnnnnnnnnnnnnnnnnnnnnnnnnnnnnnnnnnnnnnnnnnnnnnnnnnnnnnnnnnnnnnnnnnnnnnnnnnnnnnnnnnnnnnnnnnnnnnnnnnnnnnnnnnnnnnnnnnnnnnnnnnnnnnnnnnnnnnnnnnnnnnnnnnnnnnnnnnnnnnnnnnnnnnnnnnnnnnnnnnnnnnnnnnnnnnnnnnnnnnnnnnnnnnnnnnnnnnnnnnnnnnnnnnnnnnnnnnnnnnnnnnnnnnnnnnnnnnnnnnnnnnnnnnnnnnnnnnnnnnnnnnnnnnnnnnnnnnnnnnnnnnnnnnnnnnnnnnnnnnnnnnnnnnnnnnnnnnnnnnnnnnnnnnnnnnnnnnnnnnnnnnnnnnnnnnnnnnnnnnnnnnnnnnnnnnnnnnnnnnnnnnnnnnnnnnnnnnnnnnnnnnnnnnnnnnnnnnnnnnnnnnnnnnnnnnnnnnnnnnnnnnnnnnnnnnnnnnnnnnnnnnnnnnnnnnnnnnnnnnnnnnnnnnnnnnnnnnnnnnnnnnnnnnnnnnnnnnnnnnnnnnnnnnnnnnnnnnnnnnnnnnnnnnnnnnnnnnnnnnnnnnnnnnnnnnnnnnnnnnnnnnnnnnnnnnnnnnnnnnnnnnnnnnnnnnnnnnnnnnnnnnnnnnnnnnnnnnnnnnnnnnnnnnnnnnnnnnnnnnnnnnnnnnnnnnnnnnnnnnnnnnnnnnnnnnnnnnnnnnnnnnnnnnnnnnnnnnnnnnnnnnnnnnnnnnnnnnnnnnnnnnnnnnnnnnnnnnnnnnnnnnnnnnnnnnnnnnnnnnnnnnnnnnnnnnnnnnnnnnnnnnnnnnnnnnnnnnnnnnnnnnnnnnnnnnnnnnnnnnnnnnnnnnnnnnnnnnnnnnnnnnnnnnnnnnnnnnnnnnnnnnnnnnnnnnnnnnnnnnnnnnnnnnnnnnnnnnnnnnnnnnnnnnnnnnnnnnnnnnnnnnnnnnnnnnnnnnnnnnnnnnnnnnnnnnnnnnnnnnnnnnnnnnnnnnnnnnnnnnnnnnnnnnnnnnnnnnnnnnnnnnnnnnnnnnnnnnnnnnnnnnnnnnnnnnnnnnnnnnnnnnnnnnnnnnnnnnnnnnnnnnnnnnnnnnnnnnnnnnnnnnnnnnnnnnnnnnnnnnnnnnnnnnnnnnnnnnnnnnnnnnnnnnnnnnnnnnnnnnnnnnnnnnnnnnnnnnnnnnnnnnnnnnnnnnnnnnnnnnnnnnnnnnnnnnnnnnnnnnnnnnnnnnnnnnnnnnnnnnnnnnnnnnnnnnnnnnnnnnnnnnnnnnnnnnnnnnnnnnnnnnnnnnnnnnnnnnnnnnnnnnnnnnnnnnnnnnnnnnnnnnnnnnnnnnnnnnnnnnnnnnnnnnnnnnnnnnnnnnnnnnnnnnnnnnnnnnnnnnnnnnnnnnnnnnnnnnnnnnnnnnnnnnnnnnnnnnnnnnnnnnnnnnnnnnnnnnnnnnnnnnnnnnnnnnnnnnnnnnnnnnnnnnnnnnnnnnnnnnnnnnnnnnnnnnnnnnnnnnnnnnnnnnnnnnnnnnnnnnnnnnnnnnnnnnnnnnnnnnnnnnnnnnnnnnnnnnnnnnnnnnnnnnnnnnnnnnnnnnnnnnnnnnnnnnnnnnnnnnnnnnnnnnnnnnnnnnnnnnnnnnnnnnnnnnnnnnnnnnnnnnnnnnnnnnnnnnnnnnnnnnnnnnnnnnnnnnnnnnnnnnnnnnnnnnnnnnnnnnnnnnnnnnnnnnnnnnnnnnnnnnnnnnnnnnnnnnnnnnnnnnnnnnnnnnnnnnnnnnnnnnnnnnnnnnnnnnnnnnnnnnnnnnnnnnnnnnnnnnnnnnnnnnnnnnnnnnnnnnnnnnnnnnnnnnnnnnnnnnnnnnnnnnnnnnnnnnnnnnnnnnnnnnnnnnnnnnnnnnnnnnnnnnnnnnnnnnnnnnnnnnnnnnnnnnnnnnnnnnnnnnnnnnnnnnnnnnnnnnnnnnnnnnnnnnnnnnnnnnnnnnnnnnnnnnnnnnnnnnnnnnnnnnnnnnnnnnnnnnnnnnnnnnnnnnnnnnnnnnnnnnnnnnnnnnnnnnnnnnnnnnnnnnnnnnnnnnnnnnnnnnnnnnnnnnnnnnnnnnnnnnnnnnnnnnnnnnnnnnnnnnnnnnnnnnnnnnnnnnnnnnnnnnnnnnnnnnnnnnnnnnnnnnnnnnnnnnnnnnnnnnnnnnnnnnnnnnnnnnnnnnnnnnnnnnnnnnnnnnnnnnnnnnnnnnnnnnnnnnnnnnnnnnnnnnnnnnnnnnnnnnnnnnnnnnnnnnnnnnnnnnnnnnnnnnnnnnnnnnnnnnnnnnnnnnnnnnnnnnnnnnnnnnnnnnnnnnnnnnnnnnnnnnnnnnnnnnnnnnnnnnnnnnnnnnnnnnnnnnnnnnnnnnnnnnnnnnnnnnnnnnnnnnnnnnnnnnnnnnnnnnnnnnnnnnnnnnnnnnnnnnnnnnnnnnnnnnnnnnnnnnnnnnnnnnnnnnnnnnnnnnnnnnnnnnnnnnnnnnnnnnnnnnnnnnnnnnnnnnnnnnnnnnnnnnnnnnnnnnnnnnnnnnnnnnnnnnnnnnnnnnnnnnnnnnnnnnnnnnnnnnnnnnnnnnnnnnnnnnnnnnnnnnnnnnnnnnnnnnnnnnnnnnnnnnnnnnnnnnnnnnnnnnnnnnnnnnnnnnnnnnnnnnnnnnnnnnnnnnnnnnnnnnnnnnnnnnnnnnnnnnnnnnnnnnnnnnnnnnnnnnnnnnnnnnnnnnnnnnnnnnnnnnnnnnnnnnnnnnnnnnnnnnnnnnnnnnnnnnnnnnnnnnnnnnnnnnnnnnnnnnnnnnnnnnnnnnnnnnnnnnnnnnnnnnnnnnnnnnnnnnnnnnnnnnnnnnnnnnnnnnnnnnnnnnnnnnnnnnnnnnnnnnnnnnnnnnnnnnnnnnnnnnnnnnnnnnnnnnnnnnnnnnnnnnnnnnnnnnnnnnnnnnnnnnnnnnnnnnnnnnnnnnnnnnnnnnnnnnnnnnnnnnnnnnnnnnnnnnnnnnnnnnnnnnnnnnnnnnnnnnnnnnnnnnnnnnnnnnnnnnnnnnnnnnnnnnnnnnnnnnnnnnnnnnnnnnnnnnnnnnnnnnnnnnnnnnnnnnnnnnnnnnnnnnnnnnnnnnnnnnnnnnnnnnnnnnnnnnnnnnnnnnnnnnnnnnnnnnnnnnnnnnnnnnnnnnnnnnnnnnnnnnnnnnnnnnnnnnnnnnnnnnnnnnnnnnnnnnnnnnnnnnnnnnnnnnnnnnnnnnnnnnnnnnnnnnnnnnnnnnnnnnnnnnnnnnnnnnnnnnnnnnnnnnnnnnnnnnnnnnnnnnnnnnnnnnnnnnnnnnnnnnnnnnnnnnnnnnnnnnnnnnnnnnnnnnnnnnnnnnnnnnnnnnnnnnnnnnnnnnnnnnnnnnnnnnnnnnnnnnnnnnnnnnnnnnnnnnnnnnnnnnnnnnnnnnnnnnnnnnnnnnnnnnnnnnnnnnnnnnnnnnnnnnnnnnnnnnnnnnnnnnnnnnnnnnnnnnnnnnnnnnnnnnnnnnnnnnnnnnnnnnnnnnnnnnnnnnnnnnnnnnnnnnnnnnnnnnnnnnnnnnnnnnnnnnnnnnnnnnnnnnnnnnnnnnnnnnnnnnnnnnnnnnnnnnnnnnnnnnnnnnnnnnnnnnnnnnnnnnnnnnnnnnnnnnnnnnnnnnnnnnnnnnnnnnnnnnnnnnnnnnnnnnnnnnnnnnnnnnnnnnnnnnnnnnnnnnnnnnnnnnnnnnnnnnnnnnnnnnnnnnnnnnnnnnnnnnnnnnnnnnnnnnnnnnnnnnnnnnnnnnnnnnnnnnnnnnnnnnnnnnnnnnnnnnnnnnnnnnnnnnnnnnnnnnnnnnnnnnnnnnnnnnnnnnnnnnnnnnnnnnnnnnnnnnnnnnnnnnnnnnnnnnnnnnnnnnnnnnnnnnnnnnnnnnnnnnnnnnnnnnnnnnnnnnnnnnnnnnnnnnnnnnnnnnnnnnnnnnnnnnnnnnnnnnnnnnnnnnnnnnnnnnnnnnnnnnnnnnnnnnnnnnnnnnnnnnnnnnnnnnnnnnnnnnnnnnnnnnnnnnnnnnnnnnnnnnnnnnnnnnnnnnnnnnnnnnnnnnnnnnnnnnnnnnnnnnnnnnnnnnnnnnnnnnnnnnnnnnnnnnnnnnnnnnnnnnnnnnnnnnnnnnnnnnnnnnnnnnnnnnnnnnnnnnnnnnnnnnnnnnnnnnnnnnnnnnnnnnnnnnnnnnnnnnnnnnnnnnnnnnnnnnnnnnnnnnnnnnnnnnnnnnnnnnnnnnnnnnnnnnnnnnnnnnnnnnnnnnnnnnnnnnnnnnnnnnnnnnnnnnnnnnnnnnnnnnnnnnnnnnnnnnnnnnnnnnnnnnnnnnnnnnnnnnnnnnnnnnnnnnnnnnnnnnnnnnnnnnnnnnnnnnnnnnnnnnnnnnnnnnnnnnnnnnnnnnnnnnnnnnnnnnnnnnnnnnnnnnnnnnnnnnnnnnnnnnnnnnnnnnnnnnnnnnnnnnnnnnnnnnnnnnnnnnnnnnnnnnnnnnnnnnnnnnnnnnnnnnnnnnnnnnnnnnnnnnnnnnnnnnnnnnnnnnnnnnnnnnnnnnnnnnnnnnnnnnnnnnnnnnnnnnnnnnnnnnnnnnnnnnnnnnnnnnnnnnnnnnnnnnnnnnnnnnnnnnnnnnnnnnnnnnnnnnnnnnnnnnnnnnnnnnnnnnnnnnnnnnnnnnnnnnnnnnnnnnnnnnnnnnnnnnnnnnnnnnnnnnnnnnnnnnnnnnnnnnnnnnnnnnnnnnnnnnnnnnnnnnnnnnnnnnnnnnnnnnnnnnnnnnnnnnnnnnnnnnnnnnnnnnnnnnnnnnnnnnnnnnnnnnnnnnnnnnnnnnnnnnnnnnnnnnnnnnnnnnnnnnnnnnnnnnnnnnnnnnnnnnnnnnnnnnnnnnnnnnnnnnnnnnnnnnnnnnnnnnnnnnnnnnnnnnnnnnnnnnnnnnnnnnnnnnnnnnnnnnnnnnnnnnnnnnnnnnnnnnnnnnnnnnnnnnnnnnnnnnnnnnnnnnnnnnnnnnnnnnnnnnnnnnnnnnnnnnnnnnnnnnnnnnnnnnnnnnnnnnnnnnnnnnnnnnnnnnnnnnnnnnnnnnnnnnnnnnnnnnnnnnnnnnnnnnnnnnnnnnnnnnnnnnnnnnnnnnnnnnnnnnnnnnnnnnnnnnnnnnnnnnnnnnnnnnnnnnnnnnnnnnnnnnnnnnnnnnnnnnnnnnnnnnnnnnnnnnnnnnnnnnnnnnnnnnnnnnnnnnnnnnnnnnnnnnnnnnnnnnnnnnnnnnnnnnnnnnnnnnnnnnnnnnnnnnnnnnnnnnnnnnnnnnnnnnnnnnnnnnnnnnnnnnnnnnnnnnnnnnnnnnnnnnnnnnnnnnnnnnnnnnnnnnnnnnnnnnnnnnnnnnnnnnnnnnnnnnnnnnnnnnnnnnnnnnnnnnnnnnnnnnnnnnnnnnnnnnnnnnnnnnnnnnnnnnnnnnnnnnnnnnnnnnnnnnnnnnnnnnnnnnnnnnnnnnnnnnnnnnnnnnnnnnnnnnnnnnnnnnnnnnnnnnnnnnnnnnnnnnnnnnnnnnnnnnnnnnnnnnnnnnnnnnnnnnnnnnnnnnnnnnnnnnnnnnnnnnnnnnnnnnnnnnnnnnnnnnnnnnnnnnnnnnnnnnnnnnnnnnnnnnnnnnnnnnnnnnnnnnnnnnnnnnnnnnnnnnnnnnnnnnnnnnnnnnnnnnnnnnnnnnnnnnnnnnnnnnnnnnnnnnnnnnnnnnnnnnnnnnnnnnnnnnnnnnnnnnnnnnnnnnnnnnnnnnnnnnnnnnnnnnnnnnnnnnnnnnnnnnnnnnnnnnnnnnnnnnnnnnnnnnnnnnnnnnnnnnnnnnnnnnnnnnnnnnnnnnnnnnnnnnnnnnnnnnnnnnnnnnnnnnnnnnnnnnnnnnnnnnnnnnnnnnnnnnnnnnnnnnnnnnnnnnnnnnnnnnnnnnnnnnnnnnnnnnnnnnnnnnnnnnnnnnnnnnnnnnnnnnnnnnnnnnnnnnnnnnnnnnnnnnnnnnnnnnnnnnnnnnnnnnnnnnnnnnnnnnnnnnnnnnnnnnnnnnnnnnnnnnnnnnnnnnnnnnnnnnnnnnnnnnnnnnnnnnnnnnnnnnnnnnnnnnnnnnnnnnnnnnnnnnnnnnnnnnnnnnnnnnnnnnnnnnnnnnnnnnnnnnnnnnnnnnnnnnnnnnnnnnnnnnnnnnnnnnnnnnnnnnnnnnnnnnnnnnnnnnnnnnnnnnnnnnnnnnnnnnnnnnnnnnnnnnnnnnnnnnnnnnnnnnnnnnnnnnnnnnnnnnnnnnnnnnnnnnnnnnnnnnnnnnnnnnnnnnnnnnnnnnnnnnnnnnnnnnnnnnnnnnnnnnnnnnnnnnnnnnnnnnnnnnnnnnnnnnnnnnnnnnnnnnnnnnnnnnnnnnnnnnnnnnnnnnnnnnnnnnnnnnnnnnnnnnnnnnnnnnnnnnnnnnnnnnnnnnnnnnnnnnnnnnnnnnnnnnnnnnnnnnnnnnnnnnnnnnnnnnnnnnnnnnnnnnnnnnnnnnnnnnnnnnnnnnnnnnnnnnnnnnnnnnnnnnnnnnnnnnnnnnnnnnnnnnnnnnnnnnnnnnnnnnnnnnnnnnnnnnnnnnnnnnnnnnnnnnnnnnnnnnnnnnnnnnnnnnnnnnnnnnnnnnnnnnnnnnnnnnnnnnnnnnnnnnnnnnnnnnnnnnnnnnnnnnnnnnnnnnnnnnnnnnnnnnnnnnnnnnnnnnnnnnnnnnnnnnnnnnnnnnnnnnnnnnnnnnnnnnnnnnnnnnnnnnnnnnnnnnnnnnnnnnnnnnnnnnnnnnnnnnnnnnnnnnnnnnnnnnnnnnnnnnnnnnnnnnnnnnnnnnnnnnnnnnnnnnnnnnnnnnnnnnnnnnnnnnnnnnnnnnnnnnnnnnnnnnnnnnnnnnnnnnnnnnnnnnnnnnnnnnnnnnnnnnnnnnnnnnnnnnnnnnnnnnnnnnnnnnnnnnnnnnnnnnnnnnnnnnnnnnnnnnnnnnnnnnnnnnnnnnnnnnnnnnnnnnnnnnnnnnnnnnnnnnnnnnnnnnnnnnnnnnnnnnnnnnnnnnnnnnnnnnnnnnnnnnnnnnnnnnnnnnnnnnnnnnnnnnnnnnnnnnnnnnnnnnnnnnnnnnnnnnnnnnnnnnnnnnnnnnnnnnnnnnnnnnnnnnnnnnnnnnnnnnnnnnnnnnnnnnnnnnnnnnnnnnnnnnnnnnnnnnnnnnnnnnnnnnnnnnnnnnnnnnnnnnnnnnnnnnnnnnnnnnnnnnnnnnnnnnnnnnnnnnnnnnnnnnnnnnnnnnnnnnnnnnnnnnnnnnnnnnnnnnnnnnnnnnnnnnnnnnnnnnnnnnnnnnnnnnnnnnnnnnnnnnnnnnnnnnnnnnnnnnnnnnnnnnnnnnnnnnnnnnnnnnnnnnnnnnnnnnnnnnnnnnnnnnnnnnnnnnnnnnnnnnnnnnnnnnnnnnnnnnnnnnnnnnnnnnnnnnnnnnnnnnnnnnnnnnnnnnnnnnnnnnnnnnnnnnnnnnnnnnnnnnnnnnnnnnnnnnnnnnnnnnnnnnnnnnnnnnnnnnnnnnnnnnnnnnnnnnnnnnnnnnnnnnnnnnnnnnnnnnnnnnnnnnnnnnnnnnnnnnnnnnnnnnnnnnnnnnnnnnnnnnnnnnnnnnnnnnnnnnnnnnnnnnnnnnnnnnnnnnnnnnnnnnnnnnnnnnnnnnnnnnnnnnnnnnnnnnnnnnnnnnnnnnnnnnnnnnnnnnnnnnnnnnnnnnnnnnnnnnnnnnnnnnnnnnnnnnnnnnnnnnnnnnnnnnnnnnnnnnnnnnnnnnnnnnnnnnnnnnnnnnnnnnnnnnnnnnnnnnnnnnnnnnnnnnnnnnnnnnnnnnnnnnnnnnnnnnnnnnnnnnnnnnnnnnnnnnnnnnnnnnnnnnnnnnnnnnnnnnnnnnnnnnnnnnnnnnnnnnnnnnnnnnnnnnnnnnnnnnnnnnnnnnnnnnnnnnnnnnnnnnnnnnnnnnnnnnnnnnnnnnnnnnnnnnnnnnnnnnnnnnnnnnnnnnnnnnnnnnnnnnnnnnnnnnnnnnnnnnnnnnnnnnnnnnnnnnnnnnnnnnnnnnnnnnnnnnnnnnnnnnnnnnnnnnnnnnnnnnnnnnnnnnnnnnnnnnnnnnnnnnnnnnnnnnnnnnnnnnnnnnnnnnnnnnnnnnnnnnnnnnnnnnnnnnnnnnnnnnnnnnnnnnnnnnnnnnnnnnnnnnnnnnnnnnnnnnnnnnnnnnnnnnnnnnnnnnnnnnnnnnnnnnnnnnnnnnnnnnnnnnnnnnnnnnnnnnnnnnnnnnnnnnnnnnnnnnnnnnnnnnnnnnnnnnnnnnnnnnnnnnnnnnnnnnnnnnnnnnnnnnnnnnnnnnnnnnnnnnnnnnnnnnnnnnnnnnnnnnnnnnnnnnnnnnnnnnnnnnnnnnnnnnnnnnnnnnnnnnnnnnnnnnnnnnnnnnnnnnnnnnnnnnnnnnnnnnnnnnnnnnnnnnnnnnnnnnnnnnnnnnnnnnnnnnnnnnnnnnnnnnnnnnnnnnnnnnnnnnnnnnnnnnnnnnnnnnnnnnnnnnnnnnnnnnnnnnnnnnnnnnnnnnnnnnnnnnnnnnnnnnnnnnnnnnnnnnnnnnnnnnnnnnnnnnnnnnnnnnnnnnnnnnnnnnnnnnnnnnnnnnnnnnnnnnnnnnnnnnnnnnnnnnnnnnnnnnnnnnnnnnnnnnnnnnnnnnnnnnnnnnnnnnnnnnnnnnnnnnnnnnnnnnnnnnnnnnnnnnnnnnnnnnnnnnnnnnnnnnnnnnnnnnnnnnnnnnnnnnnnnnnnnnnnnnnnnnnnnnnnnnnnnnnnnnnnnnnnnnnnnnnnnnnnnnnnnnnnnnnnnnnnnnnnnnnnnnnnnnnnnnnnnnnnnnnnnnnnnnnnnnnnnnnnnnnnnnnnnnnnnnnnnnnnnnnnnnnnnnnnnnnnnnnnnnnnnnnnnnnnnnnnnnnnnnnnnnnnnnnnnnnnnnnnnnnnnnnnnnnnnnnnnnnnnnnnnnnnnnnnnnnnnnnnnnnnnnnnnnnnnnnnnnnnnnnnnnnnnnnnnnnnnnnnnnnnnnnnnnnnnnnnnnnnnnnnnnnnnnnnnnnnnnnnnnnnnnnnnnnnnnnnnnnnnnnnnnnnnnnnnnnnnnnnnnnnnnnnnnnnnnnnnnnnnnnnnnnnnnnnnnnnnnnnnnnnnnnnnnnnnnnnnnnnnnnnnnnnnnnnnnnnnnnnnnnnnnnnnnnnnnnnnnnnnnnnnnnnnnnnnnnnnnnnnnnnnnnnnnnnnnnnnnnnnnnnnnnnnnnnnnnnnnnnnnnnnnnnnnnnnnnnnnnnnnnnnnnnnnnnnnnnnnnnnnnnnnnnnnnnnnnnnnnnnnnnnnnnnnnnnnnnnnnnnnnnnnnnnnnnnnnnnnnnnnnnnnnnnnnnnnnnnnnnnnnnnnnnnnnnnnnnnnnnnnnnnnnnnnnnnnnnnnnnnnnnnnnnnnnnnnnnnnnnnnnnnnnnnnnnnnnnnnnnnnnnnnnnnnnnnnnnnnnnnnnnnnnnnnnnnnnnnnnnnnnnnnnnnnnnnnnnnnnnnnnnnnnnnnnnnnnnnnnnnnnnnnnnnnnnnnnnnnnnnnnnnnnnnnnnnnnnnnnnnnnnnnnnnnnnnnnnnnnnnnnnnnnnnnnnnnnnnnnnnnnnnnnnnnnnnnnnnnnnnnnnnnnnnnnnnnnnnnnnnnnnnnnnnnnnnnnnnnnnnnnnnnnnnnnnnnnnnnnnnnnnnnnnnnnnnnnnnnnnnnnnnnnnnnnnnnnnnnnnnnnnnnnnnnnnnnnnnnnnnnnnnnnnnnnnnnnnnnnnnnnnnnnnnnnnnnnnnnnnnnnnnnnnnnnnnnnnnnnnnnnnnnnnnnnnnnnnnnnnnnnnnnnnnnnnnnnnnnnnnnnnnnnnnnnnnnnnnnnnnnnnnnnnnnnnnnnnnnnnnnnnnnnnnnnnnnnnnnnnnnnnnnnnnnnnnnnnnnnnnnnnnnnnnnnnnnnnnnnnnnnnnnnnnnnnnnnnnnnnnnnnnnnnnnnnnnnnnnnnnnnnnnnnnnnnnnnnnnnnnnnnnnnnnnnnnnnnnnnnnnnnnnnnnnnnnnnnnnnnnnnnnnnnnnnnnnnnnnnnnnnnnnnnnnnnnnnnnnnnnnnnnnnnnnnnnnnnnnnnnnnnnnnnnnnnnnnnnnnnnnnnnnnnnnnnnnnnnnnnnnnnnnnnnnnnnnnnnnnnnnnnnnnnnnnnnnnnnnnnnnnnnnnnnnnnnnnnnnnnnnnnnnnnnnnnnnnnnnnnnnnnnnnnnnnnnnnnnnnnnnnnnnnnnnnnnnnnnnnnnnnnnnnnnnnnnnnnnnnnnnnnnnnnnnnnnnnnnnnnnnnnnnnnnnnnnnnnnnnnnnnnnnnnnnnnnnnnnnnnnnnnnnnnnnnnnnnnnnnnnnnnnnnnnnnnnnnnnnnnnnnnnnnnnnnnnnnnnnnnnnnnnnnnnnnnnnnnnnnnnnnnnnnnnnnnnnnnnnnnnnnnnnnnnnnnnnnnnnnnnnnnnnnnnnnnnnnnnnnnnnnnnnnnnnnnnnnnnnnnnnnnnnnnnnnnnnnnnnnnnnnnnnnnnnnnnnnnnnnnnnnnnnnnnnnnnnnnnnnnnnnnnnnnnnnnnnnnnnnnnnnnnnnnnnnnnnnnnnnnnnnnnnnnnnnnnnnnnnnnnnnnnnnnnnnnnnnnnnnnnnnnnnnnnnnnnnnnnnnnnnnnnnnnnnnnnnnnnnnnnnnnnnnnnnnnnnnnnnnnnnnnnnnnnnnnnnnnnnnnnnnnnnnnnnnnnnnnnnnnnnnnnnnnnnnnnnnnnnnnnnnnnnnnnnnnnnnnnnnnnnnnnnnnnnnnnnnnnnnnnnnnnnnnnnnnnnnnnnnnnnnnnnnnnnnnnnnnnnnnnnnnnnnnnnnnnnnnnnnnnnnnnnnnnnnnnnnnnnnnnnnnnnnnnnnnnnnnnnnnnnnnnnnnnnnnnnnnnnnnnnnnnnnnnnnnnnnnnnnnnnnnnnnnnnnnnnnnnnnnnnnnnnnnnnnnnnnnnnnnnnnnnnnnnnnnnnnnnnnnnnnnnnnnnnnnnnnnnnnnnnnnnnnnnnnnnnnnnnnnnnnnnnnnnnnnnnnnnnnnnnnnnnnnnnnnnnnnnnnnnnnnnnnnnnnnnnnnnnnnnnnnnnnnnnnnnnnnnnnnnnnnnnnnnnnnnnnnnnnnnnnnnnnnnnnnnnnnnnnnnnnnnnnnnnnnnnnnnnnnnnnnnnnnnnnnnnnnnnnnnnnnnnnnnnnnnnnnnnnnnnnnnnnnnnnnnnnnnnnnnnnnnnnnnnnnnnnnnnnnnnnnnnnnnnnnnnnnnnnnnnnnnnnnnnnnnnnnnnnnnnnnnnnnnnnnnnnnnnnnnnnnnnnnnnnnnnnnnnnnnnnnnnnnnnnnnnnnnnnnnnnnnnnnnnnnnnnnnnnnnnnnnnnnnnnnnnnnnnnnnnnnnnnnnnnnnnnnnnnnnnnnnnnnnnnnnnnnnnnnnnnnnnnnnnnnnnnnnnnnnnnnnnnnnnnnnnnnnnnnnnnnnnnnnnnnnnnnnnnnnnnnnnnnnnnnnnnnnnnnnnnnnnnnnnnnnnnnnnnnnnnnnnnnnnnnnnnnnnnnnnnnnnnnnnnnnnnnnnnnnnnnnnnnnnnnnnnnnnnnnnnnnnnnnnnnnnnnnnnnnnnnnnnnnnnnnnnnnnnnnnnnnnnnnnnnnnnnnnnnnnnnnnnnnnnnnnnnnnnnnnnnnnnnnnnnnnnnnnnnnnnnnnnnnnnnnnnnnnnnnnnnnnnnnnnnnnnnnnnnnnnnnnnnnnnnnnnnnnnnnnnnnnnnnnnnnnnnnnnnnnnnnnnnnnnnnnnnnnnnnnnnnnnnnnnnnnnnnnnnnnnnnnnnnnnnnnnnnnnnnnnnnnnnnnnnnnnnnnnnnnnnnnnnnnnnnnnnnnnnnnnnnnnnnnnnnnnnnnnnnnnnnnnnnnnnnnnnnnnnnnnnnnnnnnnnnnnnnnnnnnnnnnnnnnnnnnnnnnnnnnnnnnnnnnnnnnnnnnnnnnnnnnnnnnnnnnnnnnnnnnnnnnnnnnnnnnnnnnnnnnnnnnnnnnnnnnnnnnnnnnnnnnnnnnnnnnnnnnnnnnnnnnnnnnnnnnnnnnnnnnnnnnnnnnnnnnnnnnnnnnnnnnnnnnnnnnnnnnnnnnnnnnnnnnnnnnnnnnnnnnnnnnnnnnnnnnnnnnnnnnnnnnnnnnnnnnnnnnnnnnnnnnnnnnnnnnnnnnnnnnnnnnnnnnnnnnnnnnnnnnnnnnnnnnnnnnnnnnnnnnnnnnnnnnnnnnnnnnnnnnnnnnnnnnnnnnnnnnnnnnnnnnnnnnnnnnnnnnnnnnnnnnnnnnnnnnnnnnnnnnnnnnnnnnnnnnnnnnnnnnnnnnnnnnnnnnnnnnnnnnnnnnnnnnnnnnnnnnnnnnnnnnnnnnnnnnnnnnnnnnnnnnnnnnnnnnnnnnnnnnnnnnnnnnnnnnnnnnnnnnnnnnnnnnnnnnnnnnnnnnnnnnnnnnnnnnnnnnnnnnnnnnnnnnnnnnnnnnnnnnnnnnnnnnnnnnnnnnnnnnnnnnnnnnnnnnnnnnnnnnnnnnnnnnnnnnnnnnnnnnnnnnnnnnnnnnnnnnnnnnnnnnnnnnnnnnnnnnnnnnnnnnnnnnnnnnnnnnnnnnnnnnnnnnnnnnnnnnnnnnnnnnnnnnnnnnnnnnnnnnnnnnnnnnnnnnnnnnnnnnnnnnnnnnnnnnnnnnnnnnnnnnnnnnnnnnnnnnnnnnnnnnnnnnnnnnnnnnnnnnnnnnnnnnnnnnnnnnnnnnnnnnnnnnnnnnnnnnnnnnnnnnnnnnnnnnnnnnnnnnnnnnnnnnnnnnnnnnnnnnnnnnnnnnnnnnnnnnnnnnnnnnnnnnnnnnnnnnnnnnnnnnnnnnnnnnnnnnnnnnnnnnnnnnnnnnnnnnnnnnnnnnnnnnnnnnnnnnnnnnnnnnnnnnnnnnnnnnnnnnnnnnnnnnnnnnnnnnnnnnnnnnnnnnnnnnnnnnnnnnnnnnnnnnnnnnnnnnnnnnnnnnnnnnnnnnnnnnnnnnnnnnnnnnnnnnnnnnnnnnnnnnnnnnnnnnnnnnnnnnnnnnnnnnnnnnnnnnnnnnnnnnnnnnnnnnnnnnnnnnnnnnnnnnnnnnnnnnnnnnnnnnnnnnnnnnnnnnnnnnnnnnnnnnnnnnnnnnnnnnnnnnnnnnnnnnnnnnnnnnnnnnnnnnnnnnnnnnnnnnnnnnnnnnnnnnnnnnnnnnnnnnnnnnnnnnnnnnnnnnnnnnnnnnnnnnnnnnnnnnnnnnnnnnnnnnnnnnnnnnnnnnnnnnnnnnnnnnnnnnnnnnnnnnnnnnnnnnnnnnnnnnnnnnnnnnnnnnnnnnnnnnnnnnnnnnnnnnnnnnnnnnnnnnnnnnnnnnnnnnnnnnnnnnnnnnnnnnnnnnnnnnnnnnnnnnnnnnn
